(19) United States
(12) Patent Application Publication
(10) Pub. No.: US 2017/0253874 A1
(43) Pub. Date: Sep. 7, 2017

(54) COMPLEMENT COMPONENT C5 IRNA COMPOSITIONS AND METHODS OF USE THEREOF

(71) Applicant: Alnylam Pharmaceuticals, Inc., Cambridge, MA (US)

(72) Inventors: Anna Borodovsky, Melrose, MA (US); Andrew Sprague, North Andover, MA (US)

(21) Appl. No.: 15/450,339

(22) Filed: Mar. 6, 2017

Related U.S. Application Data
(63) Continuation of application No. PCT/US2015/050414, filed on Sep. 16, 2015.
(60) Provisional application No. 62/087,864, filed on Dec. 5, 2014.
(60) Provisional application No. 62/051,176, filed on Sep. 16, 2014.

(51) Int. Cl. C12N 15/113; C07K 16/18; A61K 39/395; A61K 9/00; A61K 31/713

(52) U.S. Cl. CPC C12N 15/113; A61K 9/0019; A61K 31/713; A61K 39/3955; C07K 16/18; C12N 2310/111; C12N 2310/14; C12N 2310/315; C12N 2310/321; C12N 2310/335; C12N 2320/34; C12N 2320/31; C12N 2320/35

(57) ABSTRACT

The invention relates to iRNA, e.g., double-stranded ribonucleic acid (dsRNA), compositions targeting the complement component C5 gene, and methods of using such iRNA, e.g., dsRNA, compositions to inhibit expression of C5 and to treat subjects having a complement component C5-associated disease, e.g., paroxysmal nocturnal hemoglobinuria.

### RELATED APPLICATIONS

[0001] This application is a 35 §U.S.C. 111(a) continuation application which claims the benefit of priority to PCT/US2015/050414, filed on Sep. 16, 2015, which claims priority to U.S. Provisional Application No. 62/051,176, filed on Sep. 16, 2014, and U.S. Provisional Application No. 62/087,864, filed on Dec. 5, 2014. The entire contents of each of the foregoing applications are incorporated herein by reference.

### SEQUENCE LISTING

[0002] The instant application contains a Sequence Listing which has been submitted electronically in ASCII format and is hereby incorporated by reference in its entirety. Said ASCII copy, created on Mar. 2, 2017, is named 121301_02403_SL.txt and is 956,850 bytes in size.

### BACKGROUND OF THE INVENTION

[0003] Complement was first discovered in the 1890s when it was found to aid or “complement” the killing of bacteria by heat-stable antibodies present in normal serum (Walport, M. J. (2001) N Engl J Med. 344:1058). The complement system consists of more than 30 proteins that are either present as soluble proteins in the blood or are present as membrane-associated proteins. Activation of complement leads to a sequential cascade of enzymatic reactions, known as complement activation pathways, resulting in the formation of the potent anaphylatoxins C3a and C5a that elicit a plethora of physiological responses that range from chemoattraction to apoptosis. Initially, complement was thought to play a major role in innate immunity where a robust and rapid response is mounted against invading pathogens. However, recently it is becoming increasingly evident that complement also plays an important role in adaptive immunity involving T and B cells that help in elimination of pathogens (Dunkelberger J R and Song W C. (2010) Cell Res. 20:34; Molina H, et al. (1996) Proc Natl Acad Sci USA. 93:3357), in maintaining immunologic memory preventing pathogenic re-invasion, and is involved in numerous human pathological states (Qu, H, et al. (2009) Mol Immunol. 47:185; Wagner, E. and Frank M M. (2010) Nat Rev Drug Discov. 9:43).

[0004] Complement activation is known to occur through three different pathways: alternate, classical, and lectin (FIG. 1), involving proteins that mostly exist as inactive zymogens that are then sequentially cleaved and activated. All pathways of complement activation lead to cleavage of the C5 molecule generating the anaphylatoxin C5a and, C5b that subsequently forms the terminal complement complex (C5b-9). C5a exerts a predominant pro-inflammatory activity through interactions with the classical G-protein coupled receptor C5aR (CD88) as well as with the non-G protein coupled receptor C5L2 (GPR77), expressed on various immune and non-immune cells. C5b-9 causes cytolysis through the formation of the membrane attack complex (MAC), and sub-lytic MAC and soluble C5b-9 also possess a multitude of non-cytolytic immune functions. These two complement effectors, C5a and C5b-9, generated from C5 cleavage, are key components of the complement system responsible for propagating and/or initiating pathology in different diseases, including paroxysmal nocturnal hemoglobinuria, rheumatoid arthritis, ischemia-reperfusion injuries and neurodegenerative diseases.

[0005] To date, only one therapeutic that targets the C5-C5a axis is available for the treatment of complement component C5-associated diseases, the anti-05 antibody, eculizumab (Soliris®). Although eculizumab has been shown to be effective for the treatment of paroxysmal nocturnal hemoglobinuria (PNH) and atypical hemolytic uremic syndrome (aHUS) and is currently being evaluated in clinical trials for additional complement component C5-associated diseases, eculizumab therapy requires weekly high dose infusions followed by biweekly maintenance infusions at a yearly cost of about $400,000. Accordingly, there is a need in the art for alternative therapies and combination therapies for subjects having a complement component C5-associated disease.

### SUMMARY OF THE INVENTION

[0006] The present invention provides iRNA compositions which effect the RNA-induced silencing complex (RISC)-mediated cleavage of RNA transcripts of a C5 gene. The C5 gene may be within a cell, e.g., a cell within a subject, such as a human. The present invention also provides methods and combination therapies for treating a subject having a disorder that would benefit from inhibiting or reducing the expression of a C5 gene, e.g., a complement component C5-associated disease, such as paroxysmal nocturnal hemoglobinuria (PNH) and atypical hemolytic uremic syndrome (aHUS) using iRNA compositions which effect the RNA-induced silencing complex (RISC)-mediated cleavage of RNA transcripts of a C5 gene for inhibiting the expression of a C5 gene.

[0007] Accordingly, in one aspect, the present invention provides a double-stranded ribonucleic acid (dsRNA) agent for inhibiting expression of complement component C5, wherein the dsRNA comprises a sense strand and an antisense strand, wherein the sense strand comprises at least 15 contiguous nucleotides differing by no more than 3 nucleotides from the nucleotide sequence of SEQ ID NO:1 and the antisense strand comprises at least 15 contiguous nucleotides differing by no more than 3 nucleotides from the nucleotide sequence of SEQ ID NO:5.

[0008] In another aspect, the present invention provides a double-stranded ribonucleic acid (dsRNA) agent for inhibiting expression of complement component C5, wherein the dsRNA comprises a sense strand and an antisense strand, the antisense strand comprising a region of complementarity which comprises at least 15 contiguous nucleotides differing by no more than 3 nucleotides from any one of the antisense sequences listed in any one of Tables 3, 4, 5, 6, 18, 19, 20, 21, and 23.

[0009] In one embodiment, the sense and antisense strands comprise sequences selected from the group consisting of A-118320, A-118321, A-118316, A-118317, A-118332, A-118333, A-118396, A-118397, A-118386, A-118387, A-118312, A-118313, A-118324, A-118325, A-119324, A-119325, A-119332, A-119333, A-119328, A-119329, A-119322, A-119323, A-119324, A-119325, A-119334, A-119335, A-119330, A-119331, A-119326, A-119327, A-125167, A-125173, A-125647, A-125157, A-125173, and A-125127. In another embodiment, the sense and antisense strands comprise sequences selected from the group consisting of any of the sequences in any one of Tables 3, 4, 5, 6, 18, 19, 20, 21, and 23. In one embodiment, the dsRNA agent comprises at least one modified nucleotide.

[0010] In one aspect, the present invention provides a double-stranded ribonucleic acid (dsRNA) agent for inhibiting expression of complement component C5, wherein the dsRNA agent comprises a sense strand and an antisense strand, wherein the sense strand comprises the nucleotide sequence AAGCAAGAUAUUUUUAUAAUA (SEQ ID NO:62) and wherein the antisense strand comprises the nucleotide sequence UAUUAUAAAAAUAUCUUGCUUUU (SEQ ID NO:113). In one embodiment, the dsRNA agent comprises at least one modified nucleotide, as described below.

[0011] In one aspect, the present invention provides a double stranded RNAi agent for inhibiting expression of complement component C5 wherein the double stranded RNAi agent comprises a sense strand and an antisense strand forming a double-stranded region, wherein the sense strand comprises at least 15 contiguous nucleotides differing by no more than 3 nucleotides from the nucleotide sequence of SEQ ID NO:1 and the antisense strand comprises at least 15 contiguous nucleotides differing by no more than 3 nucleotides from the nucleotide sequence of SEQ ID NO:5, wherein substantially all of the nucleotides of the sense strand and substantially all of the nucleotides of the antisense strand are modified nucleotides, and wherein the sense strand is conjugated to a ligand attached at the 3′-terminus.

[0012] In one embodiment, all of the nucleotides of the sense strand and all of the nucleotides of the antisense strand comprise a modification.

[0013] In one embodiment, substantially all of the nucleotides of the sense strand are modified nucleotides selected from the group consisting of a 2′-O-methyl modification, a 2′-fluoro modification and a 3′-terminal deoxy-thymine (dT) nucleotide. In another embodiment, substantially all of the nucleotides of the antisense strand are modified nucleotides selected from the group consisting of a 2′-O-methyl modification, a 2′-fluoro modification and a 3′-terminal deoxy-thymine (dT) nucleotide. In another embodiment, the modified nucleotides are a short sequence of deoxy-thymine (dT) nucleotides. In another embodiment, the sense strand comprises two phosphorothioate internucleotide linkages at the 5′-terminus. In one embodiment, the antisense strand comprises two phosphorothioate internucleotide linkages at the 5′-terminus and two phosphorothioate internucleotide linkages at the 3′-terminus. In yet another embodiment, the sense strand is conjugated to one or more GalNAc derivatives attached through a branched bivalent or trivalent linker at the 3′-terminus.

[0014] In one embodiment, at least one of the modified nucleotides is selected from the group consisting of a 3′-terminal deoxy-thymine (dT) nucleotide, a 2′-O-methyl modified nucleotide, a 2′-fluoro modified nucleotide, a 2′-deoxy-modified nucleotide, a locked nucleotide, an unlocked nucleotide a conformationally restricted nucleotide, a constrained ethyl nucleotide, an abasic nucleotide, a 2′-amino-modified nucleotide, a 2′-alkyl-modified nucleotide, a morpholino nucleotide, a phosphoramidate, a non-natural base comprising nucleotide, a nucleotide comprising a 5′-phosphorothioate group, and a terminal nucleotide linked to a cholesteryl derivative or a dodecanoic acid bisdecylamide group.

[0015] In another embodiment, the modified nucleotides comprise a short sequence of 3′-terminal deoxy-thymine (dT) nucleotides.

[0016] In one embodiment, the region of complementarity is at least 17 nucleotides in length. In another embodiment, the region of complementarity is between 19 and 21 nucleotides in length.

[0017] In one embodiment, the region of complementarity is 19 nucleotides in length.

[0018] In one embodiment, each strand is no more than 30 nucleotides in length.

[0019] In one embodiment, at least one strand comprises a 3′ overhang of at least 1 nucleotide.

[0020] In another embodiment, at least one strand comprises a 3′ overhang of at least 2 nucleotides.

[0021] In one embodiment, the dsRNA agent further comprises a ligand.

[0022] In one embodiment, the ligand is conjugated to the 3′ end of the sense strand of the dsRNA agent.

[0023] In one embodiment, the ligand is an N-acetylgalactosamine (GalNAc) derivative.

[0024] In one embodiment, the ligand is

[chemical structure]

[0025] In one embodiment, the dsRNA agent is conjugated to the ligand as shown in the following schematic

and, wherein X is O or S.

[0026] In one embodiment, the X is O.

[0027] In one embodiment, the region of complementarity consists of one of the antisense sequences of any one of Tables 3, 4, 5, 6, 18, 19, 20, 21, and 23.

[0028] In one embodiment, the dsRNA agent is selected from the group consisting of AD-58123, AD-58111, AD-58121, AD-58116, AD-58133, AD-58099, AD-58088, AD-58642, AD-58644, AD-58641, AD-58647, AD-58645, AD-58643, AD-58646, AD-61679, AD-62510, AD-62643, AD-62645, AD-62646, AD-62650, and AD-62651.

[0029] In another aspect, the present invention provides a double-stranded ribonucleic acid (dsRNA) agent for inhibiting expression of complement component C5, wherein the dsRNA agent comprises a sense strand and an antisense strand, wherein the sense strand comprises the nucleotide sequence AAGCAAGAUAUUUUUAUAAUA (SEQ ID NO:62) and wherein the antisense strand comprises the nucleotide sequence UAUUAUAAAAAUAUCUUGCUUUUdTdT (SEQ ID NO:2899).

[0030] In another aspect, the present invention provides a double-stranded ribonucleic acid (dsRNA) agent for inhibiting expression of complement component C5, wherein the dsRNA agent comprises a sense strand and an antisense strand, wherein the sense strand comprises the nucleotide sequence asasGfcAfaGfaUfAfUfuUfuuAfuAfauaL96 (SEQ ID NO:2876) and wherein the antisense strand comprises the nucleotide sequence usAfsUfuAfuaAfaAfauaUfcUfuGfcuususudTdT (SEQ ID NO:2889).

[0031] In another aspect, the present invention provides a double-stranded ribonucleic acid (dsRNA) agent for inhibiting expression of complement component C5, wherein the dsRNA agent comprises a sense strand and an antisense strand, wherein said sense strand comprises 21 contiguous nucleotides differing by no more than 3 nucleotides from the nucleotide sequence of SEQ ID NO:1 and said antisense strand comprises 25 contiguous nucleotides differing by no more than 3 nucleotides from the nucleotide sequence of SEQ ID NO:5, wherein all of the nucleotides of said sense strand comprise a modification selected from the group consisting of a 2′-O-methyl modification and a 2′-fluoro modification, wherein said sense strand comprises two phosphorothioate internucleotide linkages at the 5′-terminus, wherein said sense strand is conjugated to one or more GalNAc derivatives attached through a branched trivalent linker at the 3′-terminus, wherein the antisense strand comprises a 21 contiguous nucleotide region of complementarity with the sense strand, wherein the 21 contiguous nucleotide region of complementarity of the antisense strand with the sense strand forms a four base overhang at the 3′-end of the antisense strand, wherein all of the nucleotides of said antisense strand comprise a modification selected from the group consisting of a deoxynucleotide, a 2′-O-methyl modification and a 2′-fluoro modification, and wherein said antisense strand comprises two phosphorothioate internucleotide linkages at the 5′-terminus and two phosphorothioate internucleotide linkages at positions 3 and 4 from the 3′-terminus.

[0032] In one embodiment, the sense strand comprises A-118312. In another embodiment, the antisense strand comprises A-118313. In one embodiment, the sense strand comprises the nucleotide sequence 5′-usgsAfcAfaAfaUfAfAfcUfcAfcUfaUfaaL96-3′, and the antisense strand comprises the nucleotide sequence 5′-usUfsauaGfuGfaGfuuaUfuUfuGfucasasudTdT-3′, wherein dT is a deoxy-thymine; L96 is N-[tris(GalNAc-alkyl)-amidodecanoyl)]-4-hydroxyprolinol Hyp-(GalNAc-alkyl)3; the lowercase nucleotides comprise 2′-O-methyl modifications; the Af, Gf, and Uf are nucleotides comprising 2′-fluoro modifications, and s is a phosphorothioate linkage.

[0033] In one embodiment, the sense strand comprises A-125167. In another embodiment, the antisense strand comprises A-125647. In one embodiment, the sense strand comprises the nucleotide sequence 5′-asasGfcAfaGfaUfAfUfuUfuuAfuAfaua-3′ (SEQ ID NO: 2900), and the antisense strand comprises the nucleotide sequence 5′-usAfsUfuAfuaAfaAfauaUfcUfuGfcuususudTdT-3′ (SEQ ID NO: 2889), wherein dT is a deoxy-thymine; the lowercase nucleotides comprise 2′-O-methyl modifications; the Af, Gf, and Uf are nucleotides comprising 2′-fluoro modifications, and s is a phosphorothioate linkage.

[0034] In one aspect, the present invention provides a double stranded RNAi agent capable of inhibiting the expression of complement component C5 in a cell, wherein the double stranded RNAi agent comprises a sense strand complementary to an antisense strand, wherein the antisense strand comprises a region complementary to part of an mRNA encoding C5, wherein each strand is about 14 to about 30 nucleotides in length, wherein the double stranded RNAi agent is represented by formula (III):

(III)

sense:
5′ nₚ-Nₐ-(X X X)ᵢ-N_{b}-Y Y Y-N_{b}-(Z Z Z)ⱼ-Nₐ-n_{q} 3′
antisense:
3′ nₚ′-Nₐ′-(X′X′X′)ₖ-N_{b}′-Y′Y′Y′-N_{b}′-(Z′Z′Z′)ₗ-Nₐ′-
n_{q}′ 5′

[0035] wherein:

[0036] i, j, k, and 1 are each independently 0 or 1;

[0037] p, p′, q, and q′ are each independently 0-6;

[0038] each Nₐ and Nₐ′ independently represents an oligonucleotide sequence comprising 0-25 nucleotides which are either modified or unmodified or combinations thereof, each sequence comprising at least two differently modified nucleotides;

[0039] each N_{b} and N_{b}′ independently represents an oligonucleotide sequence comprising 0-10 nucleotides which are either modified or unmodified or combinations thereof;

[0040] each nₚ, nₚ′, n_{q}, and n_{q}′, each of which may or may not be present, independently represents an overhang nucleotide;
[0041] XXX, YYY, ZZZ, X′X′X′, Y′Y′Y′, and Z′Z′Z′ each independently represent one motif of three identical modifications on three consecutive nucleotides;
[0042] modifications on N_{b} differ from the modification on Y and modifications on N_{b}′ differ from the modification on Y′; and
[0043] wherein the sense strand is conjugated to at least one ligand.

[0044] In one embodiment, i is 0; j is 0; i is 1; j is 1; both i and j are 0; or both i and j are 1.

[0045] In one embodiment, k is 0; 1 is 0; k is 1; 1 is 1; both k and l are 0; or both k and l are 1.

[0046] In one embodiment, XXX is complementary to X′X′X′, YYY is complementary to Y′Y′Y′, and ZZZ is complementary to Z′Z′Z′.

[0047] In one embodiment, the YYY motif occurs at or near the cleavage site of the sense strand.

[0048] In one embodiment, the Y′Y′Y′ motif occurs at the 11, 12 and 13 positions of the antisense strand from the 5′-end.

[0049] In one embodiment, the Y′ is 2′-O-methyl.

[0050] In one embodiment, formula (III) is represented by formula (IIIa):

(IIIa)

sense:
5′ nₚ-Nₐ-Y Y Y-Nₐ-n_{q} 3′
antisense:
3′ n_{p′}-N_{a′}-Y′Y′Y′-N_{a′}-n_{q′} 5′.

[0051] In another embodiment, formula (III) is represented by formula (IIIb):

(IIIb)

sense:
5′ nₚ-Nₐ-Y Y Y-N_{b}-Z Z Z-Nₐ-n_{q} 3′
antisense:
3′ n_{p′}-N_{a′}-Y′Y′Y′-N_{b′}-Z′Z′Z-N_{a′}-n_{q′} 5′

[0052] wherein each N_{b} and N_{b}′ independently represents an oligonucleotide sequence comprising 1-5 modified nucleotides.

[0053] In yet another embodiment, formula (III) is represented by formula (IIIc):

(IIIc)

sense:
5′ nₚ-Nₐ-X X X-N_{b}-Y Y Y-Nₐ-n_{q} 3′
antisense:
3′ n_{p′}-N_{a′}-X′X′X′-N_{b′}-Y′Y′Y′-N_{a′}-n_{q′} 5′

[0054] wherein each N_{b} and N_{b}′ independently represents an oligonucleotide sequence comprising 1-5 modified nucleotides.

[0055] In another embodiment, formula (III) is represented by formula (IIId):

(IIId)

sense:
5′ nₚ-Nₐ-X X X-N_{b}-Y Y Y-N_{b}-Z Z Z-Nₐ-n_{q} 3′
antisense:
3′ n_{p′}-N_{a′}-X′X′X′-N_{b′}-Y′Y′Y′-N_{b′}-Z′Z′Z′-N_{a′}-n_{q′} 5′

[0056] wherein each N_{b} and N_{b}′ independently represents an oligonucleotide sequence comprising 1-5 modified nucleotides and each Nₐ and Nₐ′ independently represents an oligonucleotide sequence comprising 2-10 modified nucleotides.

[0057] In one embodiment, the double-stranded region is 15-30 nucleotide pairs in length.

[0058] In one embodiment, the double-stranded region is 17-23 nucleotide pairs in length. In another embodiment, the double-stranded region is 17-25 nucleotide pairs in length. In another embodiment, the double-stranded region is 23-27 nucleotide pairs in length. In yet another embodiment, the double-stranded region is 19-21 nucleotide pairs in length. In another embodiment, the double-stranded region is 21-23 nucleotide pairs in length.

[0059] In one embodiment, each strand has 15-30 nucleotides.

[0060] In one embodiment, the modifications on the nucleotides are selected from the group consisting of LNA, HNA, CeNA, 2′-methoxyethyl, 2′-O-alkyl, 2′-O-allyl, 2′-C-allyl, 2′-fluoro, 2′-deoxy, 2′-hydroxyl, and combinations thereof.

[0061] In one embodiment, the modifications on the nucleotides are 2′-O-methyl or 2′-fluoro modifications.

[0062] In one embodiment, the ligand is one or more GalNAc derivatives attached through a bivalent or trivalent branched linker.

[0063] In one embodiment, the ligand is

[chemical structure]

[0064] In one embodiment, the ligand is attached to the 3′ end of the sense strand.

[0065] In one embodiment, the RNAi agent is conjugated to the ligand as shown in the following schematic

[0066] In one embodiment, the agent further comprises at least one phosphorothioate or methylphosphonate internucleotide linkage.

[0067] In one embodiment, the phosphorothioate or methylphosphonate internucleotide linkage is at the 3′-terminus of one strand.

[0068] In one embodiment, the strand is the antisense strand. In another embodiment, the strand is the sense strand.

[0069] In one embodiment, the phosphorothioate or methylphosphonate internucleotide linkage is at the 5′-terminus of one strand.

[0070] In one embodiment, the strand is the antisense strand. In another embodiment, the strand is the sense strand.

[0071] In one embodiment, the phosphorothioate or methylphosphonate internucleotide linkage is at the both the 5′- and 3′-terminus of one strand.

[0072] In one embodiment, the strand is the antisense strand.

[0073] In one embodiment, the base pair at the 1 position of the 5′-end of the antisense strand of the duplex is an AU base pair.

[0074] In one embodiment, the Y nucleotides contain a 2′-fluoro modification.

[0075] In one embodiment, the Y′ nucleotides contain a 2′-O-methyl modification.

[0076] In one embodiment, p′>0.

[0077] In one embodiment, p′=2.

[0078] In one embodiment, q′=0, p=0, q=0, and p′ overhang nucleotides are complementary to the target mRNA.

[0079] In one embodiment, q′=0, p=0, q=0, and p′ overhang nucleotides are non-complementary to the target mRNA.

[0080] In one embodiment, the sense strand has a total of 21 nucleotides and the antisense strand has a total of 23 nucleotides.

[0081] In one embodiment, at least one nₚ′ is linked to a neighboring nucleotide via a phosphorothioate linkage.

[0082] In one embodiment, all nₚ′ are linked to neighboring nucleotides via phosphorothioate linkages.

[0083] In one embodiment, the RNAi agent is selected from the group of RNAi agents listed in Table 4, Table 18, Table 19, or Table 23. In another embodiment, the RNAi agent is selected from the group consisting of AD-58123, AD-58111, AD-58121, AD-58116, AD-58133, AD-58099, AD-58088, AD-58642, AD-58644, AD-58641, AD-58647, AD-58645, AD-58643, AD-58646, AD-61679, AD-62510, AD-62643, AD-62645, AD-62646, AD-62650, and AD-62651.

[0084] In one aspect, the present invention provides a double stranded RNAi agent capable of inhibiting the expression of complement component C5 in a cell, wherein said double stranded RNAi agent comprises a sense strand complementary to an antisense strand, wherein said antisense strand comprises a region complementary to part of an mRNA encoding complement component C5, wherein each strand is about 14 to about 30 nucleotides in length, wherein said double stranded RNAi agent is represented by formula (III):

(III)

sense:
5′ nₚ-Nₐ-(X X X)ᵢ-N_{b}-Y Y Y-N_{b}-(Z Z Z)ⱼ-Nₐ-n_{q} 3′
antisense:
3′ nₚ′-Nₐ′-(X′X′X′)ₖ-N_{b}′-Y′Y′Y′-N_{b}′-(Z′Z′Z′)ₗ-Nₐ′-
n_{q}′ 5′

[0085] wherein:

[0086] i, j, k, and 1 are each independently 0 or 1;

[0087] p, p′, q, and q′ are each independently 0-6;

[0088] each Nₐ and Nₐ′ independently represents an oligonucleotide sequence comprising 0-25 nucleotides which are either modified or unmodified or combinations thereof, each sequence comprising at least two differently modified nucleotides;

[0089] each N_{b} and N_{b}′ independently represents an oligonucleotide sequence comprising 0-10 nucleotides which are either modified or unmodified or combinations thereof;
[0090] each nₚ, nₚ′, n_{q}, and n_{q}′, each of which may or may not be present independently represents an overhang nucleotide;
[0091] XXX, YYY, ZZZ, X′X′X′, Y′Y′Y′, and Z′Z′Z′ each independently represent one motif of three identical modifications on three consecutive nucleotides, and wherein the modifications are 2′-O-methyl or 2′-fluoro modifications;
[0092] modifications on N_{b} differ from the modification on Y and modifications on N_{b}′ differ from the modification on Y′; and
[0093] wherein the sense strand is conjugated to at least one ligand.

[0094] In another aspect, the present invention provides a double stranded RNAi agent capable of inhibiting the expression of complement component C5 in a cell, wherein said double stranded RNAi agent comprises a sense strand complementary to an antisense strand, wherein said antisense strand comprises a region complementary to part of an mRNA encoding complement component C5, wherein each strand is about 14 to about 30 nucleotides in length, wherein said double stranded RNAi agent is represented by formula (III):

(III)

sense:
5′ nₚ-Nₐ-(X X X)ᵢ-N_{b}-Y Y Y-N_{b}-(Z Z Z)ⱼ-Nₐ-n_{q} 3′
antisense:
3′ nₚ′-Nₐ′-(X′X′X′)ₖ-N_{b}′-Y′Y′Y′-N_{b}′-(Z′Z′Z′)ₗ-Nₐ′-
n_{q}′ 5′

[0095] wherein:

[0096] i, j, k, and 1 are each independently 0 or 1;

[0097] each nₚ, n_{q}, and n_{q}′, each of which may or may not be present, independently represents an overhang nucleotide;
[0098] p, q, and q′ are each independently 0-6;
[0099] nₚ′>0 and at least one nₚ′ is linked to a neighboring nucleotide via a phosphorothioate linkage;

[0100] each Nₐ and Nₐ′ independently represents an oligonucleotide sequence comprising 0-25 nucleotides which are either modified or unmodified or combinations thereof, each sequence comprising at least two differently modified nucleotides;
[0101] each N_{b} and N_{b}′ independently represents an oligonucleotide sequence comprising 0-10 nucleotides which are either modified or unmodified or combinations thereof;
[0102] XXX, YYY, ZZZ, X′X′X′, Y′Y′Y′, and Z′Z′Z′ each independently represent one motif of three identical modifications on three consecutive nucleotides, and wherein the modifications are 2′-O-methyl or 2′-fluoro modifications;
[0103] modifications on N_{b} differ from the modification on Y and modifications on N_{b}′ differ from the modification on Y′; and
[0104] wherein the sense strand is conjugated to at least one ligand.

[0105] In another aspect, the present invention provides a double stranded RNAi agent capable of inhibiting the expression of complement component C5 in a cell, wherein said double stranded RNAi agent comprises a sense strand complementary to an antisense strand, wherein said antisense strand comprises a region complementary to part of an mRNA encoding complement component C5, wherein each strand is about 14 to about 30 nucleotides in length, wherein said double stranded RNAi agent is represented by formula (III):

(III)

sense:
5′ nₚ-Nₐ-(X X X)ᵢ-N_{b}-Y Y Y-N_{b}-(Z Z Z)ⱼ-Nₐ-n_{q} 3′
antisense:
3′ nₚ′-Nₐ′-(X′X′X′)ₖ-N_{b}′-Y′Y′Y′-N_{b}′-
(Z′Z′Z′)ₗ-Nₐ′-n_{q}′ 5′

[0106] wherein:

[0107] i, j, k, and 1 are each independently 0 or 1;

[0108] each nₚ, n_{q}, and n_{q}′, each of which may or may not be present, independently represents an overhang nucleotide;
[0109] p, q, and q′ are each independently 0-6;
[0110] nₚ′>0 and at least one nₚ′ is linked to a neighboring nucleotide via a phosphorothioate linkage;

[0111] each Nₐ and Nₐ′ independently represents an oligonucleotide sequence comprising 0-25 nucleotides which are either modified or unmodified or combinations thereof, each sequence comprising at least two differently modified nucleotides;

[0112] each N_{b} and N_{b}′ independently represents an oligonucleotide sequence comprising 0-10 nucleotides which are either modified or unmodified or combinations thereof;
[0113] XXX, YYY, ZZZ, X′X′X′, Y′Y′Y′, and Z′Z′Z′ each independently represent one motif of three identical modifications on three consecutive nucleotides, and wherein the modifications are 2′-O-methyl or 2′-fluoro modifications;
[0114] modifications on N_{b} differ from the modification on Y and modifications on N_{b}′ differ from the modification on Y′; and
[0115] wherein the sense strand is conjugated to at least one ligand, wherein the ligand is one or more GalNAc derivatives attached through a bivalent or trivalent branched linker.

[0116] In yet another aspect, the present invention provides a double stranded RNAi agent capable of inhibiting the expression of complement component C5 in a cell, wherein said double stranded RNAi agent comprises a sense strand complementary to an antisense strand, wherein said antisense strand comprises a region complementary to part of an mRNA encoding complement component C5, wherein each strand is about 14 to about 30 nucleotides in length, wherein said double stranded RNAi agent is represented by formula (III):

(III)

sense:
5′ nₚ-Nₐ-(X X X)ᵢ-N_{b}-Y Y Y-N_{b}-(Z Z Z)ⱼ-Nₐ-n_{q} 3′
antisense:
3′ nₚ′-Nₐ′-(X′X′X′)ₖ-N_{b}′-Y′Y′Y′-N_{b}′-(Z′Z′Z′)ₗ-Nₐ′-
n_{q}′ 5′

[0117] wherein:

[0118] i, j, k, and 1 are each independently 0 or 1;

[0119] each nₚ, n_{q}, and n_{q}′, each of which may or may not be present, independently represents an overhang nucleotide;
[0120] p, q, and q′ are each independently 0-6;
[0121] nₚ′>0 and at least one nₚ′ is linked to a neighboring nucleotide via a phosphorothioate linkage;

[0122] each Nₐ and Nₐ′ independently represents an oligonucleotide sequence comprising 0-25 nucleotides which are either modified or unmodified or combinations thereof, each sequence comprising at least two differently modified nucleotides;

[0123] each N_{b} and N_{b}′ independently represents an oligonucleotide sequence comprising 0-10 nucleotides which are either modified or unmodified or combinations thereof;
[0124] XXX, YYY, ZZZ, X′X′X′, Y′Y′Y′, and Z′Z′Z′ each independently represent one motif of three identical modifications on three consecutive nucleotides, and wherein the modifications are 2′-O-methyl or 2′-fluoro modifications;
[0125] modifications on N_{b} differ from the modification on Y and modifications on N_{b}′ differ from the modification on Y′;
[0126] wherein the sense strand comprises at least one phosphorothioate linkage; and
   [0127] wherein the sense strand is conjugated to at least one ligand, wherein the ligand is one or more GalNAc derivatives attached through a bivalent or trivalent branched linker.

[0128] In another aspect, the present invention provides a double stranded RNAi agent capable of inhibiting the expression of complement component C5 in a cell, wherein said double stranded RNAi agent comprises a sense strand complementary to an antisense strand, wherein said antisense strand comprises a region complementary to part of an mRNA encoding complement component C5, wherein each strand is about 14 to about 30 nucleotides in length, wherein said double stranded RNAi agent is represented by formula (III):

(IIIa)

sense:
5′ nₚ-Nₐ-Y Y Y-Nₐ-n_{q} 3′
antisense:
3′ nₚ′-Nₐ′-Y′Y′Y′-Nₐ′-n_{q}′ 5′

[0129] wherein:

[0130] each nₚ, n_{q}, and n_{q}′, each of which may or may not be present, independently represents an overhang nucleotide;
[0131] p, q, and q′ are each independently 0-6;
[0132] nₚ′>0 and at least one nₚ′ is linked to a neighboring nucleotide via a phosphorothioate linkage;

[0133] each Nₐ and Nₐ′ independently represents an oligonucleotide sequence comprising 0-25 nucleotides which are either modified or unmodified or combinations thereof, each sequence comprising at least two differently modified nucleotides;
[0134] YYY and Y′Y′Y′ each independently represent one motif of three identical modifications on three consecutive nucleotides, and wherein the modifications are 2′-O-methyl or 2′-fluoro modifications;
[0135] wherein the sense strand comprises at least one phosphorothioate linkage; and

[0136] wherein the sense strand is conjugated to at least one ligand, wherein the ligand is one or more GalNAc derivatives attached through a bivalent or trivalent branched linker.

[0137] In one aspect, the present invention provides a double stranded RNAi agent for inhibiting expression of complement component C5, wherein the double stranded RNAi agent comprises a sense strand and an antisense strand forming a double stranded region, wherein the sense strand comprises at least 15 contiguous nucleotides differing by no more than 3 nucleotides from the nucleotide sequence of SEQ ID NO:1 and the antisense strand comprises at least 15 contiguous nucleotides differing by no more than 3 nucleotides from the nucleotide sequence of SEQ ID NO:5, wherein substantially all of the nucleotides of the sense strand comprise a modification selected from the group consisting of a 2′-O-methyl modification and a 2′-fluoro modification, wherein the sense strand comprises two phosphorothioate internucleotide linkages at the 5′-terminus, wherein substantially all of the nucleotides of the antisense strand comprise a modification selected from the group consisting of a 2′-O-methyl modification and a 2′-fluoro modification, wherein the antisense strand comprises two phosphorothioate internucleotide linkages at the 5′-terminus and two phosphorothioate internucleotide linkages at the 3′-terminus, and wherein the sense strand is conjugated to one or more GalNAc derivatives attached through a branched bivalent or trivalent linker at the 3′-terminus.

[0138] In one embodiment, all of the nucleotides of the sense strand and all of the nucleotides of the antisense strand are modified nucleotides. In another embodiment, each strand has 19-30 nucleotides.

[0139] In one aspect, the present invention provides a cell containing a dsRNA agent of the invention.

[0140] In one aspect, the present invention provides a vector encoding at least one strand of a dsRNA agent, wherein the dsRNA agent comprises a region of complementarity to at least a part of an mRNA encoding complement component C5, wherein the dsRNA is 30 base pairs or less in length, and wherein the dsRNA agent targets the mRNA for cleavage.

[0141] In one embodiment, the region of complementarity is at least 15 nucleotides in length. In another embodiment, the region of complementarity is 19 to 21 nucleotides in length. In another embodiment, each strand has 19-30 nucleotides.

[0142] In one aspect, the present invention provides a cell comprising a vector of the invention.

[0143] In one aspect, the present invention provides a pharmaceutical composition for inhibiting expression of a complement component C5 gene comprising a dsRNA agent of the invention.

[0144] In one embodiment, the RNAi agent is administered in an unbuffered solution.

[0145] In one embodiment, the unbuffered solution is saline or water.

[0146] In one embodiment, the RNAi agent is administered with a buffer solution.

[0147] In one embodiment, the buffer solution comprises acetate, citrate, prolamine, carbonate, or phosphate or any combination thereof.

[0148] In another embodiment, the buffer solution is phosphate buffered saline (PBS).

[0149] In on embodiment, a pharmaceutical composition of the invention comprises a dsRNA agent of the invention and water for injection.

[0150] In one embodiment, a pharmaceutical composition of the invention comprising a dsRNA agent of the invention and water for injection comprises about 100, 110, 120, 130, 140, 150, 160, 170, 180, 190, 200, 210, 220, 230, 240, 250, 260, 270, 280, 290, or about 300 mg/ml of the dsRNA agent. In another aspect, the present invention provides a pharmaceutical composition comprising a double stranded RNAi agent of the invention and a lipid formulation.

[0151] In one embodiment, the lipid formulation comprises a LNP. In another embodiment, the lipid formulation comprises a MC3.

[0152] In one aspect, the present invention provides a composition comprising an antisense polynucleotide agent selected from the group consisting of the sequences listed in any one of Tables 3, 4, 5, 6, 19, 18, 20, 21, and 23.

[0153] In another aspect, the present invention provides a composition comprising a sense polynucleotide agent selected from the group consisting of the sequences listed in any one of Tables 3, 4, 5, 6, 19, 18, 20, 21, and 23.

[0154] In yet another aspect, the present invention provides a modified antisense polynucleotide agent selected from the group consisting of the antisense sequences listed in any one of Tables 4, 6, 18, 19, 21, and 23.

[0155] In a further aspect, the present invention provides a modified sense polynucleotide agent selected from the group consisting of the sense sequences listed in any one of Tables 4, 6, 18, 19, 21, and 23.

[0156] In one aspect the present invention provides methods of treating a subject having a disease or disorder that would benefit from reduction in complement component C5 expression. The methods include administering to the subject a therapeutically effective amount of a dsRNA agent comprising a sense strand and an antisense strand, wherein the sense strand comprises at least 15 contiguous nucleotides differing by no more than 3 nucleotides from the nucleotide sequence of SEQ ID NO:1 and the antisense strand comprises at least 15 contiguous nucleotides differing by no more than 3 nucleotides from the nucleotide sequence of SEQ ID NO:5, thereby treating the subject.

[0157] In another aspect, the present invention provides methods of preventing at least one symptom in a subject having a disease or disorder that would benefit from reduction in complement component C5 expression. The methods include administering to the subject a therapeutically effective amount of a dsRNA agent comprising a sense strand and an antisense strand, wherein the sense strand comprises at least 15 contiguous nucleotides differing by no more than 3 nucleotides from the nucleotide sequence of SEQ ID NO:1 and the antisense strand comprises at least 15 contiguous nucleotides differing by no more than 3 nucleotides from the nucleotide sequence of SEQ ID NO:5, thereby preventing at least one symptom in the subject having a disorder that would benefit from reduction in C5 expression.

[0158] In another aspect, the present invention provides methods of treating a subject having a disease or disorder that would benefit from reduction in complement component C5 expression. The methods include administering to the subject a therapeutically effective amount of a dsRNA agent comprising a sense strand and an antisense strand, the antisense strand comprising a region of complementarity which comprises at least 15 contiguous nucleotides differing by no more than 3 nucleotides from any one of the antisense sequences listed in any one of Tables 3, 4, 5, 6, 18, 19, 20, 21, 23, thereby treating the subject.

[0159] In yet another aspect, the present invention provides methods of preventing at least one symptom in a subject having a disease or disorder that would benefit from reduction in complement component C5 expression. The methods include administering to the subject a prophylactically effective amount of a dsRNA agent comprising a sense strand and an antisense strand, the antisense strand comprising a region of complementarity which comprises at least 15 contiguous nucleotides differing by no more than 3 nucleotides from any one of the antisense sequences listed in any one of Tables 3, 4, 5, 6, 18, 19, 20, 21, and 23, thereby preventing at least one symptom in the subject having a disorder that would benefit from reduction in C5 expression.

[0160] In one aspect, the present invention provides methods of treating a subject having a disease or disorder that would benefit from reduction in complement component C5 expression which include administering to the subject a therapeutically effective amount of a double stranded RNAi agent, wherein the double stranded RNAi agent comprises a sense strand and an antisense strand forming a double stranded region, wherein the sense strand comprises at least 15 contiguous nucleotides differing by no more than 3 nucleotides from the nucleotide sequence of SEQ ID NO:1 and the antisense strand comprises at least 15 contiguous nucleotides differing by no more than 3 nucleotides from the nucleotide sequence of SEQ ID NO:5, wherein substantially all of the nucleotides of the antisense strand and substantially all of the nucleotides of the sense strand are modified nucleotides and, wherein the sense strand is conjugated to one or more ligands at the 3′-terminus.

[0161] In one embodiment, all of the nucleotides of the sense strand and all of the nucleotides of the antisense strand are modified nucleotides.

[0162] In one embodiment, the administration is subcutaneous administration.

[0163] In one embodiment, substantially all of the nucleotides of the sense strand are modified nucleotides selected from the group consisting of a 2′-O-methyl modification, a 2′-fluoro modification and a 3′-terminal dT nucleotide. In another embodiment, substantially all of the nucleotides of the antisense strand are modified nucleotides selected from the group consisting of a 2′-O-methyl modification, a 2′-fluoro modification and a 3′-terminal dT nucleotide. In another embodiment, the modified nucleotides are a short sequence of deoxy-thymine (dT) nucleotides. In another embodiment, the sense strand comprises two phosphorothioate internucleotide linkages at the 5′-terminus. In one embodiment, the antisense strand comprises two phosphorothioate internucleotide linkages at the 5′-terminus and two phosphorothioate internucleotide linkages at the 3′-terminus. In yet another embodiment, the sense strand is conjugated to one or more GalNAc derivatives attached through a branched bivalent or trivalent linker at the 3′-terminus.

[0164] In another aspect, the present invention provides methods of preventing at least one symptom in a subject having a disease or disorder that would benefit from reduction in complement component C5 expression which include administering to the subject a prophylactically effective amount of a double stranded RNAi agent, wherein the double stranded RNAi agent comprises a sense strand and an antisense strand forming a double stranded region, wherein the sense strand comprises at least 15 contiguous nucleotides differing by no more than 3 nucleotides from the nucleotide sequence of SEQ ID NO:1 and the antisense strand comprises at least 15 contiguous nucleotides differing by no more than 3 nucleotides from the nucleotide sequence of SEQ ID NO:5, wherein substantially all of the nucleotides of the antisense strand and substantially all of the nucleotides of the sense strand are modified nucleotides and, wherein the sense strand is conjugated to a ligand at the 3′-terminus.

[0165] In one embodiment, all of the nucleotides of the sense strand and all of the nucleotides of the antisense strand are modified nucleotides.

[0166] In one embodiment, the administration is subcutaneous administration.

[0167] In one embodiment, substantially all of the nucleotides of the sense strand are modified nucleotides selected from the group consisting of a 2′-O-methyl modification, a 2′-fluoro modification and a 3′-terminal dT nucleotide. In another embodiment, substantially all of the nucleotides of the antisense strand are modified nucleotides selected from the group consisting of a 2′-O-methyl modification, a 2′-fluoro modification and a 3′-terminal dT nucleotide. In another embodiment, the modified nucleotides are a short sequence of deoxy-thymine (dT) nucleotides. In another embodiment, the sense strand comprises two phosphorothioate internucleotide linkages at the 5′-terminus. In one embodiment, the antisense strand comprises two phosphorothioate internucleotide linkages at the 5′-terminus and two phosphorothioate internucleotide linkages at the 3′-terminus. In yet another embodiment, the sense strand is conjugated to one or more GalNAc derivatives attached through a branched bivalent or trivalent linker at the 3′-terminus.

[0168] In one aspect, the present invention provides methods of treating a subject having a disease or disorder that would benefit from reduction in complement component C5 expression. The methods include administering to the subject a therapeutically effective amount of a dsRNA agent comprising a sense strand complementary to an antisense strand, wherein the antisense strand comprises a region complementary to part of an mRNA encoding C5, wherein each strand is about 14 to about 30 nucleotides in length, wherein the double stranded RNAi agent is represented by formula (III):

(III)

sense:
5′ nₚ-Nₐ-(X X X)ᵢ-N_{b}-Y Y Y-N_{b}-(Z Z Z)ⱼ-Nₐ-n_{q} 3′
antisense:
3′ nₚ′-Nₐ′-(X′X′X′)ₖ-N_{b}′-Y′Y′Y′-N_{b}′-(Z′Z′Z′)ₗ-Nₐ′-
n_{q}′ 5′

[0169] wherein:

[0170] i, j, k, and 1 are each independently 0 or 1;

[0171] p, p′, q, and q′ are each independently 0-6;

[0172] each Nₐ and Nₐ′ independently represents an oligonucleotide sequence comprising 0-25 nucleotides which are either modified or unmodified or combinations thereof, each sequence comprising at least two differently modified nucleotides;

[0173] each N_{b} and N_{b}′ independently represents an oligonucleotide sequence comprising 0-10 nucleotides which are either modified or unmodified or combinations thereof;

[0174] each nₚ, nₚ′, n_{q}, and n_{q}′, each of which may or may not be present, independently represents an overhang nucleotide;
[0175] XXX, YYY, ZZZ, X′X′X′, Y′Y′Y′, and Z′Z′Z′ each independently represent one motif of three identical modifications on three consecutive nucleotides;
[0176] modifications on N_{b} differ from the modification on Y and modifications on N_{b}′ differ from the modification on Y′; and
[0177] wherein the sense strand is conjugated to at least one ligand, thereby treating the subject, thereby treating a subject having a disease or disorder that would benefit from reduction in complement component C5 expression.

[0178] In another aspect, the present invention provides methods of preventing at least one symptom in a subject having a disease or disorder that would benefit from reduction in complement component C5 expression. The methods include administering to the subject a prophylactically effective amount of a dsRNA agent comprising a sense strand complementary to an antisense strand, wherein the antisense strand comprises a region complementary to part of an mRNA encoding C5, wherein each strand is about 14 to about 30 nucleotides in length, wherein the double stranded RNAi agent is represented by formula (III):

(III)

sense:
5′ nₚ-Nₐ-(X X X)ᵢ-N_{b}-Y Y Y-N_{b}-(Z Z Z)ⱼ-Nₐ-n_{q} 3′
antisense:
3′ nₚ′-Nₐ′-(X′X′X′)ₖ-N_{b}′-Y′Y′Y′-N_{b}′-(Z′Z′Z′)ₗ-Nₐ′-
n_{q}′ 5′

[0179] wherein:

[0180] i, j, k, and 1 are each independently 0 or 1;

[0181] p, p′, q, and q′ are each independently 0-6;

[0182] each Nₐ and Nₐ′ independently represents an oligonucleotide sequence comprising 0-25 nucleotides which are either modified or unmodified or combinations thereof, each sequence comprising at least two differently modified nucleotides;

[0183] each N_{b} and N_{b}′ independently represents an oligonucleotide sequence comprising 0-10 nucleotides which are either modified or unmodified or combinations thereof;

[0184] each nₚ, nₚ′, n_{q}, and n_{q}′, each of which may or may not be present, independently represents an overhang nucleotide;
[0185] XXX, YYY, ZZZ, X′X′X′, Y′Y′Y′, and Z′Z′Z′ each independently represent one motif of three identical modifications on three consecutive nucleotides;
[0186] modifications on N_{b} differ from the modification on Y and modifications on N_{b}′ differ from the modification on Y′; and
[0187] wherein the sense strand is conjugated to at least one ligand, thereby preventing at least one symptom in the subject having a disorder that would benefit from reduction in C5 expression, thereby preventing at least one symptom in a subject having a disease or disorder that would benefit from reduction in complement component C5 expression.

[0188] In one embodiment, the administration of the dsRNA to the subject causes a decrease in intravascular hemolysis, a stabilization of hemoglobin levels and/or a decrease in C5 protein accumulation.

[0189] In one embodiment, the disorder is a complement component C5-associated disease. In one embodiment, the complement component C5-associated disease is selected from the group consisting of paroxysmal nocturnal hemoglobinuria (PNH), atypical hemolytic uremic syndrome (aHUS), asthma, rheumatoid arthritis (RA); antiphospholipid antibody syndrome; lupus nephritis; ischemia-reperfusion injury; typical or infectious hemolytic uremic syndrome (tHUS); dense deposit disease (DDD); neuromyelitis optica (NMO); multifocal motor neuropathy (MMN); multiple sclerosis (MS); macular degeneration (e.g., age-related macular degeneration (AMD)); hemolysis, elevated liver enzymes, and low platelets (HELLP) syndrome; thrombotic thrombocytopenic purpura (TTP); spontaneous fetal loss; Pauci-immune vasculitis; epidermolysis bullosa; recurrent fetal loss; pre-eclampsia, traumatic brain injury, myasthenia gravis, cold agglutinin disease, dermatomyositis bullous pemphigoid, Shiga toxin E. coli-related hemolytic uremic syndrome, C3 nephropathy, anti-neutrophil cytoplasmic antibody-associated vasculitis, humoral and vascular transplant rejection, graft dysfunction, myocardial infarction, an allogenic transplant, sepsis, Coronary artery disease, dermatomyositis, Graves' disease, atherosclerosis, Alzheimer's disease, systemic inflammatory response sepsis, septic shock, spinal cord injury, glomerulonephritis, Hashimoto's thyroiditis, type I diabetes, psoriasis, pemphigus, autoimmune hemolytic anemia (AIHA), ITP, Goodpasture syndrome, Degos disease, antiphospholipid syndrome (APS), catastrophic APS (CAPS), a cardiovascular disorder, myocarditis, a cerebrovascular disorder, a peripheral vascular disorder, a renovascular disorder, a mesenteric/enteric vascular disorder, vasculitis, Henoch-Schönlein purpura nephritis, systemic lupus erythematosus-associated vasculitis, vasculitis associated with rheumatoid arthritis, immune complex vasculitis, Takayasu's disease, dilated cardiomyopathy, diabetic angiopathy, Kawasaki's disease (arteritis), venous gas embolus (VGE), and restenosis following stent placement, rotational atherectomy, membraneous nephropathy, Guillain-Barre syndrome, and percutaneous transluminal coronary angioplasty (PTCA). In another embodiment, the complement component C5-associated disease is paroxysmal nocturnal hemoglobinuria (PNH). In yet another embodiment, the complement component C5-associated disease is atypical hemolytic uremic syndrome (aHUS).

[0190] In one embodiment, the subject is human.

[0191] In another embodiment, the methods of the invention further include administering an anti-complement component C5 antibody, or antigen-binding fragment thereof, to the subject.

[0192] In one embodiment, the antibody, or antigen-binding fragment thereof, inhibits cleavage of complement component C5 into fragments C5a and C5b. In another embodiment, the anti-complement component C5 antibody is eculizumab.

[0193] In another embodiment, the methods of the invention further include administering a meningococcal vaccine to the subject.

[0194] In one embodiment, eculizumab is administered to the subject weekly at a dose less than about 600 mg for 4 weeks followed by a fifth dose at about one week later of less than about 900 mg, followed by a dose less than about 900 mg about every two weeks thereafter.

[0195] In another embodiment, eculizumab is administered to the subject weekly at a dose less than about 900 mg for 4 weeks followed by a fifth dose at about one week later of less than about 1200 mg, followed by a dose less than about 1200 mg about every two weeks thereafter.

[0196] In one embodiment, the subject is less than 18 years of age and eculizumab is administered to the subject weekly at a dose less than about 900 mg for 4 weeks followed by a fifth dose at about one week later of less than about 1200 mg, followed by a dose less than about 1200 mg about every two weeks thereafter.

[0197] In another embodiment, the subject is less than 18 years of age and eculizumab is administered to the subject weekly at a dose less than about 600 mg for 2 weeks followed by a third dose at about one week later of less than about 900 mg, followed by a dose less than about 900 mg about every two weeks thereafter.

[0198] In another embodiment, the subject is less than 18 years of age and eculizumab is administered to the subject weekly at a dose less than about 600 mg for 2 weeks followed by a third dose at about one week later of less than about 600 mg, followed by a dose less than about 600 mg about every two weeks thereafter.

[0199] In yet another embodiment, the subject is less than 18 years of age and eculizumab is administered to the subject weekly at a dose less than about 600 mg for 1 week followed by a second dose at about one week later of less than about 300 mg, followed by a dose less than about 300 mg about every two weeks thereafter.

[0200] In one embodiment, the subject is less than 18 years of age and eculizumab is administered to the subject weekly at a dose less than about 300 mg for 1 week followed by a second dose at about one week later of less than about 300 mg, followed by a dose less than about 300 mg about every two weeks thereafter.

[0201] In another embodiment, the methods of the invention further include plasmapheresis or plasma exchange in the subject. In one such embodiment, eculizumab is administered to the subject at a dose less than about 600 mg or at a dose less than about 300 mg.

[0202] In a further embodiment, the methods of the invention further include plasma infusion in the subject. In one such embodiment, eculizumab is administered to the subject at a dose less than about 300 mg.

[0203] In one embodiment, eculizumab is administered to the subject at a dose of about 0.01 mg/kg to about 10 mg/kg or about 0.5 mg/kg to about 15 mg/kg. In another embodiment, eculizumab is administered to the subject at a dose of about 5 mg/kg to about 15 mg/kg.

[0204] In one embodiment, eculizumab is administered to the subject at a dose selected from the group consisting of 0.5 mg/kg, 1 mg/kg, 1.5 mg/kg, 3 mg/kg, 5 mg/kg, 7 mg/kg, 10 mg/kg, and 15 mg/kg.

[0205] In one embodiment, eculizumab is administered to the subject via an intravenous infusion.

[0206] In another embodiment, eculizumab is administered to the subject subcutaneously.

[0207] In one embodiment, the dsRNA agent is administered at a dose of about 0.01 mg/kg to about 10 mg/kg or about 0.5 mg/kg to about 50 mg/kg.

[0208] In another embodiment, dsRNA agent is administered at a dose of about 10 mg/kg to about 30 mg/kg.

[0209] In one embodiment, the dsRNA agent is administered at a dose selected from the group consisting of 0.5 mg/kg 1 mg/kg, 1.5 mg/kg, 3 mg/kg, 5 mg/kg, 10 mg/kg, and 30 mg/kg.

[0210] In one embodiment, the dsRNA agent is administered to the subject once a week. In another embodiment, the dsRNA agent is administered to the subject twice a week. In another embodiment, the dsRNA agent is administered to the subject twice a month.

[0211] In one embodiment, the dsRNA agent is administered to the subject every day at a dose of 5 mg/kg for 5 days, followed by administration every week for 8 weeks at a dose of 5 mg/kg, followed by a monthly administration of a dose of 10 mg/kg thereafter.

[0212] In one embodiment, the dsRNA agent is administered to the subject subcutaneously.

[0213] In one embodiment, the dsRNA agent and the eculizumab are administered to the subject subcutaneously. In another embodiment, the dsRNA agent and the eculizumab are administered to the subject simultaneously.

[0214] In one embodiment, the dsRNA agent is administered to the subject first for a period of time sufficient to reduce the levels of complement component C5 in the subject, and eculizumab is administered subsequently at a dose less than about 600 mg.

[0215] In one embodiment, the levels of complement component C5 in the subject are reduced by at least about 30%, 35%, 40%, 45%, 50%, 55%, 60%, 65%, 70%, 75%, 80%, 85%, or 90%.

[0216] In one embodiment, eculizumab is administered at a dose of about 100-500 mg.

[0217] In one embodiment, the methods of the invention further include measuring hemoglobin and/or LDH levels in the subject.

[0218] In one embodiment, the dsRNA is conjugated to a ligand.

[0219] In one embodiment, the ligand is conjugated to the 3′-end of the sense strand of the dsRNA.

[0220] In one embodiment, the ligand is an N-acetylgalactosamine (GalNAc) derivative.

[0221] In one aspect, the present invention provides methods of inhibiting complement component C5 expression in a cell. The methods include contacting the cell with a dsRNA agent comprising a sense strand and an antisense strand, wherein the sense strand comprises at least 15 contiguous nucleotides differing by no more than 3 nucleotides from the nucleotide sequence of SEQ ID NO:1 and the antisense strand comprises at least 15 contiguous nucleotides differing by no more than 3 nucleotides from the nucleotide sequence of SEQ ID NO:5; and maintaining the cell produced in step (a) for a time sufficient to obtain degradation of the mRNA transcript of a C5 gene, thereby inhibiting expression of the C5 gene in the cell.

[0222] In another aspect, the present invention provides methods of inhibiting complement component C5 expression in a cell. The methods include contacting the cell with a dsRNA agent comprising a sense strand and an antisense strand, the antisense strand comprising a region of complementarity which comprises at least 15 contiguous nucleotides differing by no more than 3 nucleotides from any one of the antisense sequences listed in any one of Tables 3, 4, 5, 6, 18, 19, 20, 21, and 23; and maintaining the cell produced in step (a) for a time sufficient to obtain degradation of the mRNA transcript of a C5 gene, thereby inhibiting expression of the C5 gene in the cell.

[0223] In another aspect, the present invention provides methods of inhibiting complement component C5 expression in a cell, which includes contacting the cell with a dsRNA agent comprising a sense strand and an antisense strand comprising a region of complementarity, the sense strand comprises at least 15 contiguous nucleotides differing by no more than 3 nucleotides from the nucleotide sequence of SEQ ID NO:1 and the antisense strand comprises at least 15 contiguous nucleotides differing by no more than 3 nucleotides from the nucleotide sequence of SEQ ID NO:5, wherein substantially all of the nucleotides of the antisense strand and substantially all of the nucleotides of the sense strand are modified nucleotides and, wherein the sense strand is conjugated to one or more ligands at the 3′-terminus; and maintaining the cell produced in the first step for a time sufficient to obtain degradation of the mRNA transcript of a C5 gene, thereby inhibiting expression of the C5 gene in the cell.

[0224] In one embodiment, all of the nucleotides of the sense strand and all of the nucleotides of the antisense strand are modified nucleotides.

[0225] In one embodiment, substantially all of the nucleotides of the sense strand are modified nucleotides selected from the group consisting of a 2′-O-methyl modification, a 2′-fluoro modification and a 3′-terminal dT nucleotide. In another embodiment, substantially all of the nucleotides of the antisense strand are modified nucleotides selected from the group consisting of a 2′-O-methyl modification, a 2′-fluoro modification and a 3′-terminal dT nucleotide. In another embodiment, the modified nucleotides are a short sequence of deoxy-thymine (dT) nucleotides. In another embodiment, the sense strand comprises two phosphorothioate internucleotide linkages at the 5′-terminus. In one embodiment, the antisense strand comprises two phosphorothioate internucleotide linkages at the 5′-terminus and two phosphorothioate internucleotide linkages at the 3′-terminus. In yet another embodiment, the sense strand is conjugated to one or more GalNAc derivatives attached through a branched bivalent or trivalent linker at the 3′-terminus.

[0226] In yet another aspect, the present invention provides methods of inhibiting complement component C5 expression in a cell. The methods include contacting the cell with a dsRNA agent comprising a sense strand complementary to an antisense strand, wherein the antisense strand comprises a region complementary to part of an mRNA encoding C5, wherein each strand is about 14 to about 30 nucleotides in length, wherein the double stranded RNAi agent is represented by formula (III):

(III)

sense:
5′ nₚ-Nₐ-(X X X)ᵢ-N_{b}-Y Y Y-N_{b}-(Z Z Z)ⱼ-Nₐ-n_{q} 3′
antisense:
3′ nₚ′-Nₐ′-(X′X′X′)ₖ-N_{b}′-Y′Y′Y′-N_{b}′-(Z′Z′Z′)ₗ-Nₐ′-
n_{q}′ 5′

[0227] wherein:

[0228] i, j, k, and 1 are each independently 0 or 1;

[0229] p, p′, q, and q′ are each independently 0-6;

[0230] each Nₐ and Nₐ′ independently represents an oligonucleotide sequence comprising 0-25 nucleotides which are either modified or unmodified or combinations thereof, each sequence comprising at least two differently modified nucleotides;

[0231] each N_{b} and N_{b}′ independently represents an oligonucleotide sequence comprising 0-10 nucleotides which are either modified or unmodified or combinations thereof;

each nₚ, nₚ′, n_{q}, and n_{q}′, each of which may or may not be present, independently represents an overhang nucleotide;
[0232] XXX, YYY, ZZZ, X′X′X′, Y′Y′Y′, and Z′Z′Z′ each independently represent one motif of three identical modifications on three consecutive nucleotides;
[0233] modifications on N_{b} differ from the modification on Y and modifications on N_{b}′ differ from the modification on Y′; and
[0234] wherein the sense strand is conjugated to at least one ligand; and maintaining the cell produced in step (a) for a time sufficient to obtain degradation of the mRNA transcript of a C5 gene, thereby inhibiting expression of the C5 gene in the cell.

[0235] In one embodiment, the cell is within a subject.

[0236] In one embodiment, the subject is a human.

[0237] In one embodiment, the human subject suffers from a complement component C5-associated disease.

[0238] In one embodiment, the complement component C5-associated disease is selected from the group consisting of paroxysmal nocturnal hemoglobinuria (PNH), atypical hemolytic uremic syndrome (aHUS), asthma, rheumatoid arthritis (RA); antiphospholipid antibody syndrome; lupus nephritis; ischemia-reperfusion injury; typical or infectious hemolytic uremic syndrome (tHUS); dense deposit disease (DDD); neuromyelitis optica (NMO); multifocal motor neuropathy (MMN); multiple sclerosis (MS); macular degeneration (e.g., age-related macular degeneration (AMD)); hemolysis, elevated liver enzymes, and low platelets (HELLP) syndrome; thrombotic thrombocytopenic purpura (TTP); spontaneous fetal loss; Pauci-immune vasculitis; epidermolysis bullosa; recurrent fetal loss; pre-eclampsia, traumatic brain injury, myasthenia gravis, cold agglutinin disease, dermatomyositis bullous pemphigoid, Shiga toxin E. coli-related hemolytic uremic syndrome, C3 nephropathy, anti-neutrophil cytoplasmic antibody-associated vasculitis, humoral and vascular transplant rejection, graft dysfunction, myocardial infarction, an allogenic transplant, sepsis, Coronary artery disease, dermatomyositis, Graves' disease, atherosclerosis, Alzheimer's disease, systemic inflammatory response sepsis, septic shock, spinal cord injury, glomerulonephritis, Hashimoto's thyroiditis, type I diabetes, psoriasis, pemphigus, autoimmune hemolytic anemia (AIHA), ITP, Goodpasture syndrome, Degos disease, antiphospholipid syndrome (APS), catastrophic APS (CAPS), a cardiovascular disorder, myocarditis, a cerebrovascular disorder, a peripheral vascular disorder, a renovascular disorder, a mesenteric/enteric vascular disorder, vasculitis, Henoch-Schönlein purpura nephritis, systemic lupus erythematosus-associated vasculitis, vasculitis associated with rheumatoid arthritis, immune complex vasculitis, Takayasu's disease, dilated cardiomyopathy, diabetic angiopathy, Kawasaki's disease (arteritis), venous gas embolus (VGE), and restenosis following stent placement, rotational atherectomy, membraneous nephropathy, Guillain-Barre syndrome, and percutaneous transluminal coronary angioplasty (PTCA). In another embodiment, the complement component C5-associated disease is paroxysmal nocturnal hemoglobinuria (PNH). In another embodiment, the complement component C5-associated disease is atypical hemolytic uremic syndrome (aHUS).

[0239] In one embodiment, the methods further include contacting the cell with an anti-complement component C5 antibody, or antigen-binding fragment thereof.

[0240] In one embodiment, the antibody, or antigen-binding fragment thereof, inhibits cleavage of complement component C5 into fragments C5a and C5b.

[0241] In one embodiment, the anti-complement component C5 antibody, or antigen-binding fragment thereof, is eculizumab.

[0242] In one embodiment, the methods further include contacting the cell with a meningococcal vaccine.

[0243] In one embodiment, the cell is contacted with eculizumab weekly at a dose less than about 600 mg for 4 weeks followed by a fifth dose at about one week later of less than about 900 mg, followed by a dose less than about 900 mg about every two weeks thereafter.

[0244] In another embodiment, the cell is contacted with eculizumab weekly at a dose less than about 900 mg for 4 weeks followed by a fifth dose at about one week later of less than about 1200 mg, followed by a dose less than about 1200 mg about every two weeks thereafter.

[0245] In another embodiment, the cell is contacted with eculizumab weekly at a dose less than about 900 mg for 4 weeks followed by a fifth dose at about one week later of less than about 1200 mg, followed by a dose less than about 1200 mg about every two weeks thereafter.

[0246] In yet another embodiment, the cell is contacted with eculizumab weekly at a dose less than about 600 mg for 2 weeks followed by a third dose at about one week later of less than about 900 mg, followed by a dose less than about 900 mg about every two weeks thereafter.

[0247] In one embodiment, the cell is contacted with eculizumab weekly at a dose less than about 600 mg for 2 weeks followed by a third dose at about one week later of less than about 600 mg, followed by a dose less than about 600 mg about every two weeks thereafter.

[0248] In another embodiment, the cell is contacted with eculizumab weekly at a dose less than about 600 mg for 1 week followed by a second dose at about one week later of less than about 300 mg, followed by a dose less than about 300 mg about every two weeks thereafter.

[0249] In one embodiment, the cell is contacted with eculizumab weekly at a dose less than about 300 mg for 1 week followed by a second dose at about one week later of less than about 300 mg, followed by a dose less than about 300 mg about every two weeks thereafter.

[0250] In one embodiment, the cell is within a subject.

[0251] In one embodiment, the methods of the invention further include plasmapheresis or plasma exchange in the subject. In one embodiment, eculizumab is administered to the subject at a dose less than about 600 mg. In another embodiment, eculizumab is administered to the subject at a dose less than about 300 mg.

[0252] In one embodiment, the methods of the invention further include plasma infusion in the subject. In one embodiment, eculizumab is administered to the subject at a dose less than about 300 mg.

[0253] In one embodiment, the cell is contacted with eculizumab at a dose of about 0.01 mg/kg to about 10 mg/kg or about 0.5 mg/kg to about 15 mg/kg.

[0254] In another embodiment, the cell is contacted with eculizumab at a dose of about 5 mg/kg to about 15 mg/kg.

[0255] In one embodiment, the cell is contacted with eculizumab at a dose selected from the group consisting of 0.5 mg/kg, 1 mg/kg, 1.5 mg/kg, 3 mg/kg, 5 mg/kg, 7 mg/kg, 10 mg/kg, and 15 mg/kg.

[0256] In one embodiment, eculizumab is administered to the subject via an intravenous infusion. In another embodiment, eculizumab is administered to the subject subcutaneously.

[0257] In one embodiment, the cell is contacted with the dsRNA agent at a dose of about 0.01 mg/kg to about 10 mg/kg or about 0.5 mg/kg to about 50 mg/kg.

[0258] In another embodiment, the cell is contacted with the dsRNA agent at a dose of about 10 mg/kg to about 30 mg/kg.

[0259] In one embodiment, the cell is contacted with the dsRNA agent at a dose selected from the group consisting of 0.5 mg/kg 1 mg/kg, 1.5 mg/kg, 3 mg/kg, 5 mg/kg, 10 mg/kg, and 30 mg/kg.

[0260] In one embodiment, the cell is contacted with the dsRNA agent once a week. In another embodiment, the dsRNA agent is administered to the subject twice a week. In another embodiment, the cell is contacted with the dsRNA agent twice a month.

[0261] In one embodiment, the dsRNA agent is administered to the subject subcutaneously.

[0262] In one embodiment, the dsRNA agent and the eculizumab are administered to the subject subcutaneously. In another embodiment, the dsRNA agent and the eculizumab are administered to the subject simultaneously.

[0263] In one embodiment, the cell is contacted with the dsRNA agent and the eculizumab simultaneously.

[0264] In one embodiment, the dsRNA agent is administered to the subject first for a period of time sufficient to reduce the levels of complement component C5 in the subject, and eculizumab is administered subsequently at a dose less than about 600 mg.

[0265] In one embodiment, the levels of complement component C5 in the subject are reduced by at least about 30%, 35%, 40%, 45%, 50%, 55%, 60%, 65%, 70%, 75%, 80%, 85%, or 90%.

[0266] In one embodiment, eculizumab is administered at a dose of about 100-500 mg.

[0267] In one embodiment, the cell is contacted with the dsRNA agent first for a period of time sufficient to reduce the levels of complement component C5 in the cell, and the cell is subsequently contacted with eculizumab at a dose less than about 600 mg.

[0268] In one embodiment, the levels of complement component C5 in the cell are reduced by at least about 30%, 35%, 40%, 45%, 50%, 55%, 60%, 65%, 70%, 75%, 80%, 85%, or 90%.

[0269] In one embodiment, the cell is contacted with eculizumab at a dose of about 100-500 mg.

[0270] In one aspect, the present invention provides methods of inhibiting the expression of C5 in a subject. The methods include administering to the subject a therapeutically effective amount of a dsRNA agent comprising a sense strand and an antisense strand, wherein the sense strand comprises at least 15 contiguous nucleotides differing by no more than 3 nucleotides from the nucleotide sequence of SEQ ID NO:1 and the antisense strand comprises at least 15 contiguous nucleotides differing by no more than 3 nucleotides from the nucleotide sequence of SEQ ID NO:5, thereby inhibiting the expression of C5 in the subject.

[0271] In another aspect, the present invention provides methods of inhibiting the expression of C5 in a subject. The methods include administering to the subject a therapeutically effective amount of a dsRNA agent comprising a sense strand and an antisense strand, the antisense strand comprising a region of complementarity which comprises at least 15 contiguous nucleotides differing by no more than 3 nucleotides from any one of the antisense sequences listed in any one of Tables 3, 4, 5, 6, 18, 19, 20, 21, and 23, thereby inhibiting the expression of C5 in the subject.

[0272] In another aspect, the present invention provides methods of inhibiting complement component C5 expression in a subject which include administering to the subject a therapeutically effective amount of a dsRNA agent comprising a sense strand and an antisense strand forming a double stranded region, wherein the sense strand comprises at least 15 contiguous nucleotides differing by no more than 3 nucleotides from the nucleotide sequence of SEQ ID NO:1 and the antisense strand comprises at least 15 contiguous nucleotides differing by no more than 3 nucleotides from the nucleotide sequence of SEQ ID NO:5, wherein substantially all of the nucleotides of the antisense strand and substantially all of the nucleotides of the sense strand are modified nucleotides and, wherein the sense strand is conjugated to one or more ligands at the 3′-terminus, thereby inhibiting expression of the C5 gene in the subject.

[0273] In one embodiment, all of the nucleotides of the sense strand and all of the nucleotides of the antisense strand are modified nucleotides.

[0274] In one embodiment, the administration is subcutaneous administration.

[0275] In one embodiment, substantially all of the nucleotides of the sense strand are modified nucleotides selected from the group consisting of a 2′-O-methyl modification, a 2′-fluoro modification and a 3′-terminal dT nucleotide. In another embodiment, substantially all of the nucleotides of the antisense strand are modified nucleotides selected from the group consisting of a 2′-O-methyl modification, a 2′-fluoro modification and a 3′-terminal dT nucleotide. In another embodiment, the modified nucleotides are a short sequence of deoxy-thymine (dT) nucleotides. In another embodiment, the sense strand comprises two phosphorothioate internucleotide linkages at the 5′-terminus. In one embodiment, the antisense strand comprises two phosphorothioate internucleotide linkages at the 5′-terminus and two phosphorothioate internucleotide linkages at the 3′-terminus. In yet another embodiment, the sense strand is conjugated to one or more GalNAc derivatives attached through a branched bivalent or trivalent linker at the 3′-terminus.

[0276] In another aspect, the present invention provides methods of inhibiting the expression of C5 in a subject. The methods include administering to the subject a therapeutically effective amount of a dsRNA agent comprising a sense strand complementary to an antisense strand, wherein the antisense strand comprises a region complementary to part of an mRNA encoding C5, wherein each strand is about 14 to about 30 nucleotides in length, wherein the double stranded RNAi agent is represented by formula (III):

(III)

sense:
5′ nₚ-Nₐ-(X X X)ᵢ-N_{b}-Y Y Y-N_{b}-(Z Z Z)ⱼ-Nₐ-n_{q} 3′
antisense:
3′ nₚ′-Nₐ′-(X′X′X′)ₖ-N_{b}′-Y′Y′Y′-N_{b}′-(Z′Z′Z′)ₗ-Nₐ′-
n_{q}′ 5′

[0277] wherein:

[0278] i, j, k, and 1 are each independently 0 or 1;

[0279] p, p′, q, and q′ are each independently 0-6;

[0280] each Nₐ and Nₐ′ independently represents an oligonucleotide sequence comprising 0-25 nucleotides which are either modified or unmodified or combinations thereof, each sequence comprising at least two differently modified nucleotides;

[0281] each N_{b} and N_{b}′ independently represents an oligonucleotide sequence comprising 0-10 nucleotides which are either modified or unmodified or combinations thereof;

[0282] each nₚ, nₚ′, n_{q}, and n_{q}′, each of which may or may not be present, independently represents an overhang nucleotide;
[0283] XXX, YYY, ZZZ, X′X′X′, Y′Y′Y′, and Z′Z′Z′ each independently represent one motif of three identical modifications on three consecutive nucleotides;
[0284] modifications on N_{b} differ from the modification on Y and modifications on N_{b}′ differ from the modification on Y′; and
[0285] wherein the sense strand is conjugated to at least one ligand, thereby inhibiting the expression of C5 in the subject.

[0286] In one embodiment, the methods further include administration of an anti-complement component C5 antibody, or antigen-binding fragment thereof, to the subject.

[0287] In one embodiment, the anti-complement component C5 antibody, or antigen-binding fragment thereof, is eculizumab.

[0288] In one embodiment, the antibody, or antigen-binding fragment thereof, inhibits cleavage of complement component C5 into fragments C5a and C5b.

[0289] In one embodiment, the methods of the invention further include administering a meningococcal vaccine to the subject.

[0290] In one embodiment, eculizumab is administered to the subject weekly at a dose less than about 600 mg for 4 weeks followed by a fifth dose at about one week later of less than about 900 mg, followed by a dose less than about 900 mg about every two weeks thereafter.

[0291] In another embodiment, eculizumab is administered to the subject weekly at a dose less than about 900 mg for 4 weeks followed by a fifth dose at about one week later of less than about 1200 mg, followed by a dose less than about 1200 mg about every two weeks thereafter.

[0292] In one embodiment, the subject is less than 18 years of age and eculizumab is administered to the subject weekly at a dose less than about 900 mg for 4 weeks followed by a fifth dose at about one week later of less than about 1200 mg, followed by a dose less than about 1200 mg about every two weeks thereafter.

[0293] In another embodiment, the subject is less than 18 years of age and eculizumab is administered to the subject weekly at a dose less than about 600 mg for 2 weeks followed by a third dose at about one week later of less than about 900 mg, followed by a dose less than about 900 mg about every two weeks thereafter.

[0294] In one embodiment, the subject is less than 18 years of age and eculizumab is administered to the subject weekly at a dose less than about 600 mg for 2 weeks followed by a third dose at about one week later of less than about 600 mg, followed by a dose less than about 600 mg about every two weeks thereafter.

[0295] In another embodiment, the subject is less than 18 years of age and eculizumab is administered to the subject weekly at a dose less than about 600 mg for 1 week followed by a second dose at about one week later of less than about 300 mg, followed by a dose less than about 300 mg about every two weeks thereafter.

[0296] In yet another embodiment, the subject is less than 18 years of age and eculizumab is administered to the subject weekly at a dose less than about 300 mg for 1 week followed by a second dose at about one week later of less than about 300 mg, followed by a dose less than about 300 mg about every two weeks thereafter.

[0297] In one embodiment, the methods further include plasmapheresis or plasma exchange in the subject. In one embodiment, eculizumab is administered to the subject at a dose less than about 600 mg. In another embodiment, eculizumab is administered to the subject at a dose less than about 300 mg.

[0298] In one embodiment, the methods further include plasma infusion in the subject. In one embodiment, eculizumab is administered to the subject at a dose less than about 300 mg.

[0299] In one embodiment, eculizumab is administered to the subject at a dose of about 0.01 mg/kg to about 10 mg/kg or about 0.5 mg/kg to about 15 mg/kg. In another embodiment, eculizumab is administered to the subject at a dose of about 5 mg/kg to about 15 mg/kg.

[0300] In another embodiment, eculizumab is administered to the subject at a dose selected from the group consisting of 0.5 mg/kg, 1 mg/kg, 1.5 mg/kg, 3 mg/kg, 5 mg/kg, 7 mg/kg, 10 mg/kg, and 30 mg/kg.

[0301] In one embodiment, eculizumab is administered to the subject via an intravenous infusion. In another embodiment, eculizumab is administered to the subject subcutaneously.

[0302] In one embodiment, the dsRNA agent is administered at a dose of about 0.01 mg/kg to about 10 mg/kg or about 0.5 mg/kg to about 15 mg/kg.

[0303] In one embodiment, the dsRNA agent is administered at a dose of about 10 mg/kg to about 30 mg/kg. In another embodiment, the dsRNA agent is administered at a dose selected from the group consisting of 0.5 mg/kg 1 mg/kg, 1.5 mg/kg, 3 mg/kg, 5 mg/kg, 10 mg/kg, and 30 mg/kg.

[0304] In one embodiment, the dsRNA agent is administered to the subject once a week. In another embodiment, the dsRNA agent is administered to the subject twice a week. In another embodiment, the dsRNA agent is administered to the subject twice a month.

[0305] In one embodiment, the dsRNA agent is administered to the subject subcutaneously.

[0306] In one embodiment, the dsRNA agent and the eculizumab are administered to the subject subcutaneously. In another embodiment, the dsRNA agent and the eculizumab are administered to the subject simultaneously.

[0307] In one embodiment, the dsRNA agent is administered to the subject first for a period of time sufficient to reduce the levels of complement component C5 in the subject, and eculizumab is administered subsequently at a dose less than about 600 mg.

[0308] In one embodiment, the levels of complement component C5 in the subject are reduced by at least about 30%, 35%, 40%, 45%, 50%, 55%, 60%, 65%, 70%, 75%, 80%, 85%, or 90%.

[0309] In one embodiment, eculizumab is administered at a dose of about 100-500 mg.

[0310] In one embodiment, the dsRNA agent is conjugated to a ligand.

[0311] In one embodiment, the ligand is conjugated to the 3′-end of the sense strand of the dsRNA agent.

[0312] In one embodiment, the ligand is an N-acetylgalactosamine (GalNAc) derivative.

### BRIEF DESCRIPTION OF THE DRAWINGS

[0313] FIG. 1 is a schematic of the three complement pathways: alternative, classical and lectin.

[0314] FIG. 2 is a graph showing the percentage of complement component C5 remaining in C57BL/6 mice following a single 10 mg/kg dose of the indicated iRNAs.

[0315] FIG. 3 is a graph showing the percentage of complement component C5 remaining in C57BL/6 mice following a single 10 mg/kg dose of the indicated iRNAs.

[0316] FIG. 4 is a graph showing the percentage of complement component C5 remaining in C57BL/6 mice 48 hours after a single 10 mg/kg dose of the indicated iRNAs.

[0317] FIG. 5A is a graph showing the percentage of hemolysis remaining at days 4 and 7 in rats after a single 2.5 mg/kg, 10 mg/kg, or 25 mg/kg subcutaneous dose of AD-58642.

[0318] FIG. 5B is a Western blot showing the amount of complement component C5 remaining at day 7 in rats after a single 2.5 mg/kg, 10 mg/kg, or 25 mg/kg subcutaneous dose of AD-58642.

[0319] FIG. 6A is a graph showing the percentage of complement component C5 remaining in C57BL/6 mice 5 days after a single 1.25 mg/kg, 2.5 mg/kg, 5 mg/kg, 10 mg/kg or 25 mg/kg dose of AD-58642. FIG. 6B is a graph showing the percentage of complement component C5 remaining in C57BL/6 mice 5 days after a single 1.25 mg/kg, 2.5 mg/kg, 5 mg/kg, 10 mg/kg or 25 mg/kg dose of AD-58642.

[0320] FIG. 7A is a graph showing the percentage of hemolysis remaining at day 5 in C57BL/6 mice after a single 1.25 mg/kg, 2.5 mg/kg, 5 mg/kg, 10 mg/kg or 25 mg/kg dose of AD-58642. FIG. 7B is a graph showing the percentage of hemolysis remaining at day 5 in C57BL/6 mice after a single 1.25 mg/kg, 2.5 mg/kg, 5 mg/kg, 10 mg/kg or 25 mg/kg dose of AD-58642.

[0321] FIG. 8 is a Western blot showing the amount of complement component C5 remaining at day 5 in C57BL/6 mice after a single 1.25 mg/kg, 2.5 mg/kg, 5 mg/kg, 10 mg/kg or 25 mg/kg dose of AD-58642.

[0322] FIG. 9 is a graph showing the amount of complement component C5 protein remaining at days 5 and 9 in mouse serum after a single 0.625 mg/kg, 1.25 mg/kg, 2.5 mg/kg, 5.0 mg/kg, or 10 mg/kg dose of AD-58641. The lower limit of quantitation (LLOQ) of the assay is shown as a dashed line.

[0323] FIG. 10 is a is a graph showing the amount of complement component C5 protein remaining at day 8 in mouse serum after a 0.625 mg/kg, 1.25 mg/kg, or 2.5 mg/kg dose of AD-58641 at days 0, 1, 2, and 3. The lower limit of quantitation (LLOQ) of the assay is shown as a dashed line.

[0324] FIGS. 11A and 11B depict the efficacy and cumulative effect of repeat administration of compound AD-58641 in rats. FIG. 11A is graph depicting the hemolytic activity remaining in the serum of rats on days 0, 4, 7, 11, 14, 18, 25, and 32 after repeat administration at 2.5 mg/kg/dose or 5.0 mg/kg/dose, q2w×3 (twice a week for 3 weeks). FIG. 11B is a Western blot showing the amount of complement component C5 protein remaining in the serum of the animals.

[0325] FIG. 12 is a graph showing the amount of complement component C5 protein in cynomolgus macaque serum at various time points before, during and after two rounds of subcutaneous dosing at 2.5 mg/kg or 5 mg/kg of AD-58641 every third day for eight doses. C5 protein levels were normalized to the average of the three pre-dose samples.

[0326] FIG. 13 is a graph showing the percentage of hemolysis remaining in cynomolgus macaque serum at various time points before, during and after two rounds of subcutaneous dosing at 2.5 mg/kg or 5 mg/kg of AD-58641 every third day for eight doses. Percent hemolysis was calculated relative to maximal hemolysis and to background hemolysis in control samples.

[0327] FIG. 14 is a graph showing the percentage of complement component C5 protein remaining at day 5 in the serum of C57BL/6 mice following a single 1 mg/kg dose of the indicated iRNAs.

[0328] FIG. 15 is a graph showing the percentage of complement component C5 protein remaining at day 5 in the serum of C57BL/6 mice following a single 0.25 mg/kg, 0.5 mg/kg, 1.0 mg/kg, or 2.0 mg/kg dose of the indicated iRNAs.

[0329] FIG. 16 is a graph showing the percentage of complement component C5 protein remaining in the serum of C57BL/6 mice at days 6, 13, 20, 27, and 34 following a single 1 mg/kg dose of the indicated iRNAs.

[0330] FIG. 17 is a graph showing the percentage of hemolysis remaining in rat serum at various time points following administration of a 5 mg/kg dose of the indicated compounds at days 0, 4, and 7.

[0331] FIG. 18A shows the nucleotide sequence of Homo sapiens Complement Component 5 (C5) (SEQ ID NO:1); FIG. 18B shows the nucleotide sequence of Macaca mulatta Complement Component 5 (C5) (SEQ ID NO:2); FIG. 18C shows the nucleotide sequence of Mus musculus Complement Component 5 (C5) (SEQ ID NO:3); FIG. 18D shows the nucleotide sequence of Rattus norvegicus Complement Component 5 (C5) (SEQ ID NO:4); FIG. 18E shows the reverse complement of SEQ ID NO:1 (SEQ ID NO:5); FIG. 18F shows the reverse complement of SEQ ID NO:2 (SEQ ID NO:6); FIG. 18G shows the reverse complement of SEQ ID NO:3 (SEQ ID NO:7); and FIG. 18H shows the reverse complement of SEQ ID NO:4 (SEQ ID NO:8).

[0332] FIG. 19A is a graph showing the percentage of serum C5 levels in cynomolgus macaques treated with AD-62643 relative to pre-bleed levels. FIG. 19B is a graph showing the percentage of serum C5 levels in each individual cynomolgus macaque treated with AD-62643.

[0333] FIG. 20A is a graph showing the percentage of hemolysis in cynomolgus macaques treated with a QM regimen (5 mg/kg, qd×5, qw×8/10 mg/kg qm thereafter) of AD-62643 and FIG. 20B is a graph showing the percentage of hemolysis in cynomolgus macaques treated with a Q2W regimen (5 mg/kg, qw×8, q2w thereafter) of AD-62643. FIG. 20C is a graph showing the percentage of alternative complement pathway activity in cynomolgus macaques treated with AD-62643.

[0334] FIG. 21 is a graph showing serum levels of C5 protein in a mouse model of anti-collagen antibody-induced arthritis (CAIA) following treatment with AD-61679 and anti-05 antibody.

[0335] FIG. 22A is a bar graph showing join histology scores in CAIA mice following treatment with AD-61679 and anti-05 antibody. FIG. 22B is a bar graph showing levels of C3 deposition in CAIA mice following treatment with AD-61679 and anti-05 antibody.

[0336] FIG. 23A is a bar graph showing the percentage of hemolysis in a rat model of Passive Neymann Nephritis treated with anti-Fx1a or with anti-Fx1a and AD-61679. FIG. 23B is a bar graph showing the levels of urinary protein in a rat model of Passive Neymann Nephritis treated with anti-Fx1a or with anti-Fx1a and AD-61679.

### DETAILED DESCRIPTION OF THE INVENTION

[0337] The present invention provides iRNA agents which effect the RNA-induced silencing complex (RISC)-mediated cleavage of RNA transcripts of a complement component C5 gene.

[0338] The iRNAs of the invention include an RNA strand (the antisense strand) having a region which is about 30 nucleotides or less in length, e.g., 15-30, 15-29, 15-28, 15-27, 15-26, 15-25, 15-24, 15-23, 15-22, 15-21, 15-20, 15-19, 15-18, 15-17, 18-30, 18-29, 18-28, 18-27, 18-26, 18-25, 18-24, 18-23, 18-22, 18-21, 18-20, 19-30, 19-29, 19-28, 19-27, 19-26, 19-25, 19-24, 19-23, 19-22, 19-21, 19-20, 20-30, 20-29, 20-28, 20-27, 20-26, 20-25, 20-24, 20-23, 20-22, 20-21, 21-30, 21-29, 21-28, 21-27, 21-26, 21-25, 21-24, 21-23, or 21-22 nucleotides in length, which region is substantially complementary to at least part of an mRNA transcript of a C5 gene. The use of these iRNAs enables the targeted degradation of mRNAs of a C5 gene in mammals. Very low dosages of C5 iRNAs, in particular, can specifically and efficiently mediate RNA interference (RNAi), resulting in significant inhibition of expression of a C5 gene. The present inventors have demonstrated that iRNAs targeting C5 can mediate RNAi in vitro and in vivo, resulting in significant inhibition of expression of a C5 gene. Thus, methods and compositions including these iRNAs are useful for treating a subject who would benefit by a reduction in the levels and/or activity of a C5 protein, such as a subject having a complement component C5-associated disease, such as paroxysmal nocturnal hemoglobinuria (PNH).

[0339] The present invention also provides methods and combination therapies for treating a subject having a disorder that would benefit from inhibiting or reducing the expression of a C5 gene, e.g., a complement component C5-associated disease, such as paroxysmal nocturnal hemoglobinuria (PNH) and atypical hemolytic uremic syndrome (aHUS) using iRNA compositions which effect the RNA-induced silencing complex (RISC)-mediated cleavage of RNA transcripts of a complement component C5 gene.

[0340] The present invention also provides methods for preventing at least one symptom, e.g., hemolysis, in a subject having a disorder that would benefit from inhibiting or reducing the expression of a C5 gene, e.g., a complement component C5-associated disease, such as paroxysmal nocturnal hemoglobinuria (PNH) and atypical hemolytic uremic syndrome (aHUS). The present invention further provides iRNA compositions which effect the RNA-induced silencing complex (RISC)-mediated cleavage of RNA transcripts of a complement component C5 gene. The C5 gene may be within a cell, e.g., a cell within a subject, such as a human.

[0341] The combination therapies of the present invention include administering to a subject having a complement component C5-associated disease, an RNAi agent of the invention and an additional therapeutic, such as anti-complement component C5 antibody, or antigen-binding fragment thereof, e.g., eculizumab. The combination therapies of the invention reduce C5 levels in the subject (e.g., by about 30%, 35%, 40%, 45%, 50%, 55%, 60%, 65%, 70%, 75%, 80%, 85%, 90%, 95%, or about 99%) by targeting C5 mRNA with an iRNA agent of the invention and, accordingly, allow the therapeutically (or prophylactically) effective amount of eculizumab required to treat the subject to be reduced, thereby decreasing the costs of treatment and permitting easier and more convenient ways of administering eculizumab, such as subcutaneous administration.

[0342] The following detailed description discloses how to make and use compositions containing iRNAs to inhibit the expression of a C5 gene, as well as compositions, uses, and methods for treating subjects having diseases and disorders that would benefit from inhibition and/or reduction of the expression of this gene.

### I. Definitions

[0343] In order that the present invention may be more readily understood, certain terms are first defined. In addition, it should be noted that whenever a value or range of values of a parameter are recited, it is intended that values and ranges intermediate to the recited values are also intended to be part of this invention.

[0344] The articles “a” and “an” are used herein to refer to one or to more than one (i.e., to at least one) of the grammatical object of the article. By way of example, “an element” means one element or more than one element, e.g., a plurality of elements.

[0345] The term “including” is used herein to mean, and is used interchangeably with, the phrase “including but not limited to”.

[0346] The term “or” is used herein to mean, and is used interchangeably with, the term “and/or,” unless context clearly indicates otherwise.

[0347] As used herein, “complement component C5,” used interchangeably with the term “C5” refers to the well-known gene and polypeptide, also known in the art as CPAMD4, C3 and PZP-like alpha-2-macroglobulin domain-containing protein, anaphylatoxin C5a analog, hemolytic complement (Hc), and complement C5. The sequence of a human C5 mRNA transcript can be found at, for example, GenBank Accession No. GI:38016946 (NM_001735.2; SEQ ID NO:1). The sequence of rhesus C5 mRNA can be found at, for example, GenBank Accession No. GI:297270262 (XM_001095750.2; SEQ ID NO:2). The sequence of mouse C5 mRNA can be found at, for example, GenBank Accession No. GI:291575171 (NM_010406.2; SEQ ID NO:3). The sequence of rat C5 mRNA can be found at, for example, GenBank Accession No. GI:392346248 (XM_345342.4; SEQ ID NO:4). Additional examples of C5 mRNA sequences are readily available using publicly available databases, e.g., GenBank.

[0348] The term“C5,” as used herein, also refers to naturally occurring DNA sequence variations of the C5 gene, such as a single nucleotide polymorphism in the C5 gene. Numerous SNPs within the C5 gene have been identified and may be found at, for example, NCBI dbSNP (see, e.g., ncbi.nlm.nih.gov/snp). Non-limiting examples of SNPs within the C5 gene may be found at, NCBI dbSNP Accession Nos. rs121909588 and rs121909587.

[0349] As used herein, “target sequence” refers to a contiguous portion of the nucleotide sequence of an mRNA molecule formed during the transcription of a C5 gene, including mRNA that is a product of RNA processing of a primary transcription product. In one embodiment, the target portion of the sequence will be at least long enough to serve as a substrate for iRNA-directed cleavage at or near that portion of the nucleotide sequence of an mRNA molecule formed during the transcription of a C5 gene.

[0350] The target sequence may be from about 9-36 nucleotides in length, e.g., about 15-30 nucleotides in length. For example, the target sequence can be from about 15-30 nucleotides, 15-29, 15-28, 15-27, 15-26, 15-25, 15-24, 15-23, 15-22, 15-21, 15-20, 15-19, 15-18, 15-17, 18-30, 18-29, 18-28, 18-27, 18-26, 18-25, 18-24, 18-23, 18-22, 18-21, 18-20, 19-30, 19-29, 19-28, 19-27, 19-26, 19-25, 19-24, 19-23, 19-22, 19-21, 19-20, 20-30, 20-29, 20-28, 20-27, 20-26, 20-25, 20-24, 20-23, 20-22, 20-21, 21-30, 21-29, 21-28, 21-27, 21-26, 21-25, 21-24, 21-23, or 21-22 nucleotides in length. Ranges and lengths intermediate to the above recited ranges and lengths are also contemplated to be part of the invention.

[0351] As used herein, the term “strand comprising a sequence” refers to an oligonucleotide comprising a chain of nucleotides that is described by the sequence referred to using the standard nucleotide nomenclature.

[0352] “G,” “C,” “A,” “T” and “U” each generally stand for a nucleotide that contains guanine, cytosine, adenine, thymidine and uracil as a base, respectively. However, it will be understood that the term “ribonucleotide” or “nucleotide” can also refer to a modified nucleotide, as further detailed below, or a surrogate replacement moiety (see, e.g., Table 2). The skilled person is well aware that guanine, cytosine, adenine, and uracil can be replaced by other moieties without substantially altering the base pairing properties of an oligonucleotide comprising a nucleotide bearing such replacement moiety. For example, without limitation, a nucleotide comprising inosine as its base can base pair with nucleotides containing adenine, cytosine, or uracil. Hence, nucleotides containing uracil, guanine, or adenine can be replaced in the nucleotide sequences of dsRNA featured in the invention by a nucleotide containing, for example, inosine. In another example, adenine and cytosine anywhere in the oligonucleotide can be replaced with guanine and uracil, respectively to form G-U Wobble base pairing with the target mRNA. Sequences containing such replacement moieties are suitable for the compositions and methods featured in the invention.

[0353] The terms “iRNA”, “RNAi agent,” “iRNA agent,”, “RNA interference agent” as used interchangeably herein, refer to an agent that contains RNA as that term is defined herein, and which mediates the targeted cleavage of an RNA transcript via an RNA-induced silencing complex (RISC) pathway. iRNA directs the sequence-specific degradation of mRNA through a process known as RNA interference (RNAi). The iRNA modulates, e.g., inhibits, the expression of C5 in a cell, e.g., a cell within a subject, such as a mammalian subject.

[0354] In one embodiment, an RNAi agent of the invention includes a single stranded RNA that interacts with a target RNA sequence, e.g., a C5 target mRNA sequence, to direct the cleavage of the target RNA. Without wishing to be bound by theory it is believed that long double stranded RNA introduced into cells is broken down into siRNA by a Type III endonuclease known as Dicer (Sharp et al. (2001) Genes Dev. 15:485). Dicer, a ribonuclease-III-like enzyme, processes the dsRNA into 19-23 base pair short interfering RNAs with characteristic two base 3′ overhangs (Bernstein, et al., (2001) Nature 409:363). The siRNAs are then incorporated into an RNA-induced silencing complex (RISC) where one or more helicases unwind the siRNA duplex, enabling the complementary antisense strand to guide target recognition (Nykanen, et al., (2001) Cell 107:309). Upon binding to the appropriate target mRNA, one or more endonucleases within the RISC cleave the target to induce silencing (Elbashir, et al., (2001) Genes Dev. 15:188). Thus, in one aspect the invention relates to a single stranded RNA (siRNA) generated within a cell and which promotes the formation of a RISC complex to effect silencing of the target gene, i.e., a C5 gene. Accordingly, the term “siRNA” is also used herein to refer to an RNAi as described above.

[0355] In another embodiment, the RNAi agent may be a single-stranded siRNA that is introduced into a cell or organism to inhibit a target mRNA. Single-stranded RNAi agents bind to the RISC endonuclease, Argonaute 2, which then cleaves the target mRNA. The single-stranded siRNAs are generally 15-30 nucleotides and are chemically modified. The design and testing of single-stranded siRNAs are described in U.S. Pat. No. 8,101,348 and in Lima et al., (2012) Cell 150: 883-894, the entire contents of each of which are hereby incorporated herein by reference. Any of the antisense nucleotide sequences described herein may be used as a single-stranded siRNA as described herein or as chemically modified by the methods described in Lima et al., (2012) Cell 150:883-894.

[0356] In another embodiment, an “iRNA” for use in the compositions, uses, and methods of the invention is a double-stranded RNA and is referred to herein as a “double stranded RNAi agent,” “double-stranded RNA (dsRNA) molecule,” “dsRNA agent,” or “dsRNA”. The term “dsRNA”, refers to a complex of ribonucleic acid molecules, having a duplex structure comprising two anti-parallel and substantially complementary nucleic acid strands, referred to as having “sense” and “antisense” orientations with respect to a target RNA, i.e., a C5 gene. In some embodiments of the invention, a double-stranded RNA (dsRNA) triggers the degradation of a target RNA, e.g., an mRNA, through a post-transcriptional gene-silencing mechanism referred to herein as RNA interference or RNAi.

[0357] In general, the majority of nucleotides of each strand of a dsRNA molecule are ribonucleotides, but as described in detail herein, each or both strands can also include one or more non-ribonucleotides, e.g., a deoxyribonucleotide and/or a modified nucleotide. In addition, as used in this specification, an “RNAi agent” may include ribonucleotides with chemical modifications; an RNAi agent may include substantial modifications at multiple nucleotides. As used herein, the term “modified nucleotide” refers to a nucleotide having, independently, a modified sugar moiety, a modified internucleotide linkage, and/or a modified nucleobase. Thus, the term modified nucleotide encompasses substitutions, additions or removal of, e.g., a functional group or atom, to internucleoside linkages, sugar moieties, or nucleobases. The modifications suitable for use in the agents of the invention include all types of modifications disclosed herein or known in the art. Any such modifications, as used in a siRNA type molecule, are encompassed by “RNAi agent” for the purposes of this specification and claims. The duplex region may be of any length that permits specific degradation of a desired target RNA through a RISC pathway, and may range from about 9 to 36 base pairs in length, e.g., about 15-30 base pairs in length, for example, about 9, 10, 11, 12, 13, 14, 15, 16, 17, 18, 19, 20, 21, 22, 23, 24, 25, 26, 27, 28, 29, 30, 31, 32, 33, 34, 35, or 36 base pairs in length, such as about 15-30, 15-29, 15-28, 15-27, 15-26, 15-25, 15-24, 15-23, 15-22, 15-21, 15-20, 15-19, 15-18, 15-17, 18-30, 18-29, 18-28, 18-27, 18-26, 18-25, 18-24, 18-23, 18-22, 18-21, 18-20, 19-30, 19-29, 19-28, 19-27, 19-26, 19-25, 19-24, 19-23, 19-22, 19-21, 19-20, 20-30, 20-29, 20-28, 20-27, 20-26, 20-25, 20-24, 20-23, 20-22, 20-21, 21-30, 21-29, 21-28, 21-27, 21-26, 21-25, 21-24, 21-23, or 21-22 base pairs in length. Ranges and lengths intermediate to the above recited ranges and lengths are also contemplated to be part of the invention.

[0358] The two strands forming the duplex structure may be different portions of one larger RNA molecule, or they may be separate RNA molecules. Where the two strands are part of one larger molecule, and therefore are connected by an uninterrupted chain of nucleotides between the 3′-end of one strand and the 5′-end of the respective other strand forming the duplex structure, the connecting RNA chain is referred to as a “hairpin loop.” A hairpin loop can comprise at least one unpaired nucleotide. In some embodiments, the hairpin loop can comprise at least 2, at least 3, at least 4, at least 5, at least 6, at least 7, at least 8, at least 9, at least 10, at least 20, at least 23 or more unpaired nucleotides.

[0359] Where the two substantially complementary strands of a dsRNA are comprised by separate RNA molecules, those molecules need not, but can be covalently connected. Where the two strands are connected covalently by means other than an uninterrupted chain of nucleotides between the 3′-end of one strand and the 5′-end of the respective other strand forming the duplex structure, the connecting structure is referred to as a “linker.” The RNA strands may have the same or a different number of nucleotides. The maximum number of base pairs is the number of nucleotides in the shortest strand of the dsRNA minus any overhangs that are present in the duplex. In addition to the duplex structure, an RNAi may comprise one or more nucleotide overhangs.

[0360] In one embodiment, an RNAi agent of the invention is a dsRNA of 24-30 nucleotides that interacts with a target RNA sequence, e.g., a C5 target mRNA sequence, to direct the cleavage of the target RNA. Without wishing to be bound by theory, long double stranded RNA introduced into cells is broken down into siRNA by a Type III endonuclease known as Dicer (Sharp et al. (2001) Genes Dev. 15:485). Dicer, a ribonuclease-III-like enzyme, processes the dsRNA into 19-23 base pair short interfering RNAs with characteristic two base 3′ overhangs (Bernstein, et al., (2001) Nature 409:363). The siRNAs are then incorporated into an RNA-induced silencing complex (RISC) where one or more helicases unwind the siRNA duplex, enabling the complementary antisense strand to guide target recognition (Nykanen, et al., (2001) Cell 107:309). Upon binding to the appropriate target mRNA, one or more endonucleases within the RISC cleave the target to induce silencing (Elbashir, et al., (2001) Genes Dev. 15:188).

[0361] As used herein, the term “nucleotide overhang” refers to at least one unpaired nucleotide that protrudes from the duplex structure of an iRNA, e.g., a dsRNA. For example, when a 3′-end of one strand of a dsRNA extends beyond the 5′-end of the other strand, or vice versa, there is a nucleotide overhang. A dsRNA can comprise an overhang of at least one nucleotide; alternatively the overhang can comprise at least two nucleotides, at least three nucleotides, at least four nucleotides, at least five nucleotides or more. A nucleotide overhang can comprise or consist of a nucleotide/nucleoside analog, including a deoxynucleotide/nucleoside. The overhang(s) can be on the sense strand, the antisense strand or any combination thereof. Furthermore, the nucleotide(s) of an overhang can be present on the 5′-end, 3′-end or both ends of either an antisense or sense strand of a dsRNA.

[0362] In one embodiment, the antisense strand of a dsRNA has a 1-10 nucleotide, e.g., a 1, 2, 3, 4, 5, 6, 7, 8, 9, or 10 nucleotide, overhang at the 3′-end and/or the 5′-end. In one embodiment, the sense strand of a dsRNA has a 1-10 nucleotide, e.g., a 1, 2, 3, 4, 5, 6, 7, 8, 9, or 10 nucleotide, overhang at the 3′-end and/or the 5′-end. In another embodiment, one or more of the nucleotides in the overhang is replaced with a nucleoside thiophosphate.

[0363] “Blunt” or “blunt end” means that there are no unpaired nucleotides at that end of the double stranded RNAi agent, i.e., no nucleotide overhang. A “blunt ended” RNAi agent is a dsRNA that is double-stranded over its entire length, i.e., no nucleotide overhang at either end of the molecule. The RNAi agents of the invention include RNAi agents with nucleotide overhangs at one end (i.e., agents with one overhang and one blunt end) or with nucleotide overhangs at both ends.

[0364] The term “antisense strand” or “guide strand” refers to the strand of an iRNA, e.g., a dsRNA, which includes a region that is substantially complementary to a target sequence, e.g., a C5 mRNA. As used herein, the term “region of complementarity” refers to the region on the antisense strand that is substantially complementary to a sequence, for example a target sequence, e.g., a C5 nucleotide sequence, as defined herein. Where the region of complementarity is not fully complementary to the target sequence, the mismatches can be in the internal or terminal regions of the molecule. Generally, the most tolerated mismatches are in the terminal regions, e.g., within 5, 4, 3, or 2 nucleotides of the 5′- and/or 3′-terminus of the iRNA.

[0365] The term “sense strand,” or “passenger strand” as used herein, refers to the strand of an iRNA that includes a region that is substantially complementary to a region of the antisense strand as that term is defined herein.

[0366] As used herein, the term “cleavage region” refers to a region that is located immediately adjacent to the cleavage site. The cleavage site is the site on the target at which cleavage occurs. In some embodiments, the cleavage region comprises three bases on either end of, and immediately adjacent to, the cleavage site. In some embodiments, the cleavage region comprises two bases on either end of, and immediately adjacent to, the cleavage site. In some embodiments, the cleavage site specifically occurs at the site bound by nucleotides 10 and 11 of the antisense strand, and the cleavage region comprises nucleotides 11, 12 and 13.

[0367] As used herein, and unless otherwise indicated, the term “complementary,” when used to describe a first nucleotide sequence in relation to a second nucleotide sequence, refers to the ability of an oligonucleotide or polynucleotide comprising the first nucleotide sequence to hybridize and form a duplex structure under certain conditions with an oligonucleotide or polynucleotide comprising the second nucleotide sequence, as will be understood by the skilled person. Such conditions can, for example, be stringent conditions, where stringent conditions can include: 400 mM NaCl, 40 mM PIPES pH 6.4, 1 mM EDTA, 50° C. or 70° C. for 12-16 hours followed by washing (see, e.g., “Molecular Cloning: A Laboratory Manual, Sambrook, et al. (1989) Cold Spring Harbor Laboratory Press). Other conditions, such as physiologically relevant conditions as can be encountered inside an organism, can apply. The skilled person will be able to determine the set of conditions most appropriate for a test of complementarity of two sequences in accordance with the ultimate application of the hybridized nucleotides.

[0368] Complementary sequences within an iRNA, e.g., within a dsRNA as described herein, include base-pairing of the oligonucleotide or polynucleotide comprising a first nucleotide sequence to an oligonucleotide or polynucleotide comprising a second nucleotide sequence over the entire length of one or both nucleotide sequences. Such sequences can be referred to as “fully complementary” with respect to each other herein. However, where a first sequence is referred to as “substantially complementary” with respect to a second sequence herein, the two sequences can be fully complementary, or they can form one or more, but generally not more than 5, 4, 3 or 2 mismatched base pairs upon hybridization for a duplex up to 30 base pairs, while retaining the ability to hybridize under the conditions most relevant to their ultimate application, e.g., inhibition of gene expression via a RISC pathway. However, where two oligonucleotides are designed to form, upon hybridization, one or more single stranded overhangs, such overhangs shall not be regarded as mismatches with regard to the determination of complementarity. For example, a dsRNA comprising one oligonucleotide 21 nucleotides in length and another oligonucleotide 23 nucleotides in length, wherein the longer oligonucleotide comprises a sequence of 21 nucleotides that is fully complementary to the shorter oligonucleotide, can yet be referred to as “fully complementary” for the purposes described herein.

[0369] “Complementary” sequences, as used herein, can also include, or be formed entirely from, non-Watson-Crick base pairs and/or base pairs formed from non-natural and modified nucleotides, in so far as the above requirements with respect to their ability to hybridize are fulfilled. Such non-Watson-Crick base pairs include, but are not limited to, G:U Wobble or Hoogstein base pairing.

[0370] The terms “complementary,” “fully complementary” and “substantially complementary” herein can be used with respect to the base matching between the sense strand and the antisense strand of a dsRNA, or between the antisense strand of an iRNA agent and a target sequence, as will be understood from the context of their use.

[0371] As used herein, a polynucleotide that is “substantially complementary to at least part of” a messenger RNA (mRNA) refers to a polynucleotide that is substantially complementary to a contiguous portion of the mRNA of interest (e.g., an mRNA encoding C5). For example, a polynucleotide is complementary to at least a part of a C5 mRNA if the sequence is substantially complementary to a non-interrupted portion of an mRNA encoding C5.

[0372] In general, the majority of nucleotides of each strand are ribonucleotides, but as described in detail herein, each or both strands can also include one or more non-ribonucleotides, e.g., a deoxyribonucleotide and/or a modified nucleotide. In addition, an “iRNA” may include ribonucleotides with chemical modifications. Such modifications may include all types of modifications disclosed herein or known in the art. Any such modifications, as used in an iRNA molecule, are encompassed by “iRNA” for the purposes of this specification and claims.

[0373] In one aspect of the invention, an agent for use in the methods and compositions of the invention is a single-stranded antisense RNA molecule that inhibits a target mRNA via an antisense inhibition mechanism. The single-stranded antisense RNA molecule is complementary to a sequence within the target mRNA. The single-stranded antisense oligonucleotides can inhibit translation in a stoichiometric manner by base pairing to the mRNA and physically obstructing the translation machinery, see Dias, N. et al., (2002) Mol Cancer Ther 1:347-355. The single-stranded antisense RNA molecule may be about 15 to about 30 nucleotides in length and have a sequence that is complementary to a target sequence. For example, the single-stranded antisense RNA molecule may comprise a sequence that is at least about 15, 16, 17, 18, 19, 20, or more contiguous nucleotides from any one of the antisense sequences described herein.

[0374] The term “lipid nanoparticle” or “LNP” is a vesicle comprising a lipid layer encapsulating a pharmaceutically active molecule, such as a nucleic acid molecule, e.g., an iRNA or a plasmid from which an iRNA is transcribed. LNPs are described in, for example, U.S. Pat. Nos. 6,858,225, 6,815,432, 8,158,601, and 8,058,069, the entire contents of which are hereby incorporated herein by reference.

[0375] As used herein, a “subject” is an animal, such as a mammal, including a primate (such as a human, a non-human primate, e.g., a monkey, and a chimpanzee), a non-primate (such as a cow, a pig, a camel, a llama, a horse, a goat, a rabbit, a sheep, a hamster, a guinea pig, a cat, a dog, a rat, a mouse, a horse, and a whale), or a bird (e.g., a duck or a goose). In an embodiment, the subject is a human, such as a human being treated or assessed for a disease, disorder or condition that would benefit from reduction in C5 expression; a human at risk for a disease, disorder or condition that would benefit from reduction in C5 expression; a human having a disease, disorder or condition that would benefit from reduction in C5 expression; and/or human being treated for a disease, disorder or condition that would benefit from reduction in C5 expression as described herein.

[0376] As used herein, the terms “treating” or “treatment” refer to a beneficial or desired result including, but not limited to, alleviation or amelioration of one or more symptoms associated with unwanted complement pathway activation (e.g., hemolysis and/or chronic inflammation);

[0377] diminishing the extent of unwanted complement pathway activation; stabilization (i.e., not worsening) of the state of chronic inflammation and/or hemolysis; amelioration or palliation of unwanted complement pathway activation (e.g., chronic inflammation and/or hemolysis) whether detectable or undetectable. “Treatment” can also mean prolonging survival as compared to expected survival in the absence of treatment.

[0378] The term “lower” in the context of the level of a complement component C5 in a subject or a disease marker or symptom refers to a statistically significant decrease in such level. The decrease can be, for example, at least 10%, at least 15%, at least 20%, at least 25%, at least 30%, at least 35%, at least 40%, at least 45%, at least 50%, at least 55%, at least 60%, at least 65%, at least 70%, at least 75%, at least 80%, at least 85%, at least 90%, at least 95%, or more and is preferably down to a level accepted as within the range of normal for an individual without such disorder.

[0379] As used herein, “prevention” or “preventing,” when used in reference to a disease, disorder or condition thereof, that would benefit from a reduction in expression of a C5 gene, refers to a reduction in the likelihood that a subject will develop a symptom associated with such a disease, disorder, or condition, e.g., a symptom of unwanted complement activation, such as a chronic inflammation, hemolysis and/or thrombosis. The likelihood of developing a thrombosis is reduced, for example, when an individual having one or more risk factors for a thrombosis either fails to develop a thrombosis or develops a thrombosis with less severity relative to a population having the same risk factors and not receiving treatment as described herein. The failure to develop a disease, disorder or condition, or the reduction in the development of a symptom associated with such a disease, disorder or condition (e.g., by at least about 10% on a clinically accepted scale for that disease or disorder), or the exhibition of delayed symptoms delayed (e.g., by days, weeks, months or years) is considered effective prevention.

[0380] As used herein, the term “complement component C5-associated disease” is a disease or disorder that is caused by, or associated with complement activation. Such diseases are typically associated with inflammation and/or immune system activation, e.g., membrane attack complex-mediated lysis, anaphylaxis, and/or hemolysis. Non-limiting examples of complement component C5-associated diseases include paroxysmal nocturnal hemoglobinuria (PNH), atypical hemolytic uremic syndrome (aHUS), asthma, rheumatoid arthritis (RA); antiphospholipid antibody syndrome; lupus nephritis; ischemia-reperfusion injury; typical or infectious hemolytic uremic syndrome (tHUS); dense deposit disease (DDD); neuromyelitis optica (NMO); multifocal motor neuropathy (MMN); multiple sclerosis (MS); macular degeneration (e.g., age-related macular degeneration (AMD)); hemolysis, elevated liver enzymes, and low platelets (HELLP) syndrome; thrombotic thrombocytopenic purpura (TTP); spontaneous fetal loss; Pauci-immune vasculitis; epidermolysis bullosa; recurrent fetal loss; pre-eclampsia, traumatic brain injury, myasthenia gravis, cold agglutinin disease, dermatomyositis bullous pemphigoid, Shiga toxin E. coli-related hemolytic uremic syndrome, C3 nephropathy, anti-neutrophil cytoplasmic antibody-associated vasculitis (e.g., granulomatosis with polyangiitis (previously known as Wegener granulomatosis), Churg-Strauss syndrome, and microscopic polyangiitis), humoral and vascular transplant rejection, graft dysfunction, myocardial infarction (e.g., tissue damage and ischemia in myocardial infarction), an allogenic transplant, sepsis (e.g., poor outcome in sepsis), Coronary artery disease, dermatomyositis, Graves' disease, atherosclerosis, Alzheimer's disease, systemic inflammatory response sepsis, septic shock, spinal cord injury, glomerulonephritis, Hashimoto's thyroiditis, type I diabetes, psoriasis, pemphigus, autoimmune hemolytic anemia (AIHA), ITP, Goodpasture syndrome, Degos disease, antiphospholipid syndrome (APS), catastrophic APS (CAPS), a cardiovascular disorder, myocarditis, a cerebrovascular disorder, a peripheral (e.g., musculoskeletal) vascular disorder, a renovascular disorder, a mesenteric/enteric vascular disorder, vasculitis, Henoch-Schönlein purpura nephritis, systemic lupus erythematosus-associated vasculitis, vasculitis associated with rheumatoid arthritis, immune complex vasculitis, Takayasu's disease, dilated cardiomyopathy, diabetic angiopathy, Kawasaki's disease (arteritis), venous gas embolus (VGE), and restenosis following stent placement, rotational atherectomy, membraneous nephropathy, Guillain-Barre syndrome, and percutaneous transluminal coronary angioplasty (PTCA) (see, e.g., Holers (2008) Immunological Reviews 223:300-316; Holers and Thurman (2004) Molecular Immunology 41:147-152; U.S. Patent Publication No. 20070172483).

[0381] In one embodiment, a complement component C5-associated disease is paroxysmal nocturnal hemoglobinuria (PNH). The PNH may be classical PNH or PNH in the setting of another bone marrow failure syndrome and/or myelodysplastic syndromes (MDS), e.g., cytopenias. In another embodiment, a complement component C5-associated disease is atypical hemolytic uremic syndrome (aHUS).

### II. iRNAs of the Invention

[0382] The present invention provides iRNAs which inhibit the expression of a complement component C5 gene. In one embodiment, the iRNA agent includes double-stranded ribonucleic acid (dsRNA) molecules for inhibiting the expression of a C5 gene in a cell, such as a cell within a subject, e.g., a mammal, such as a human having a complement component C5-associated disease, e.g., PNH. The dsRNA includes an antisense strand having a region of complementarity which is complementary to at least a part of an mRNA formed in the expression of a C5 gene. The region of complementarity is about 30 nucleotides or less in length (e.g., about 30, 29, 28, 27, 26, 25, 24, 23, 22, 21, 20, 19, or 18 nucleotides or less in length). Upon contact with a cell expressing the C5 gene, the iRNA inhibits the expression of the C5 gene (e.g., a human, a primate, a non-primate, or a bird C5 gene) by at least about 10% as assayed by, for example, a PCR or branched DNA (bDNA)-based method, or by a protein-based method, such as by immunofluorescence analysis, using, for example, Western Blotting or flowcytometric techniques.

[0383] A dsRNA includes two RNA strands that are complementary and hybridize to form a duplex structure under conditions in which the dsRNA will be used. One strand of a dsRNA (the antisense strand) includes a region of complementarity that is substantially complementary, and generally fully complementary, to a target sequence. The target sequence can be derived from the sequence of an mRNA formed during the expression of a C5 gene. The other strand (the sense strand) includes a region that is complementary to the antisense strand, such that the two strands hybridize and form a duplex structure when combined under suitable conditions. As described elsewhere herein and as known in the art, the complementary sequences of a dsRNA can also be contained as self-complementary regions of a single nucleic acid molecule, as opposed to being on separate oligonucleotides.

[0384] Generally, the duplex structure is between 15 and 30 base pairs in length, e.g., between, 15-29, 15-28, 15-27, 15-26, 15-25, 15-24, 15-23, 15-22, 15-21, 15-20, 15-19, 15-18, 15-17, 18-30, 18-29, 18-28, 18-27, 18-26, 18-25, 18-24, 18-23, 18-22, 18-21, 18-20, 19-30, 19-29, 19-28, 19-27, 19-26, 19-25, 19-24, 19-23, 19-22, 19-21, 19-20, 20-30, 20-29, 20-28, 20-27, 20-26, 20-25, 20-24, 20-23, 20-22, 20-21, 21-30, 21-29, 21-28, 21-27, 21-26, 21-25, 21-24, 21-23, or 21-22 base pairs in length. Ranges and lengths intermediate to the above recited ranges and lengths are also contemplated to be part of the invention.

[0385] Similarly, the region of complementarity to the target sequence is between 15 and 30 nucleotides in length, e.g., between 15-29, 15-28, 15-27, 15-26, 15-25, 15-24, 15-23, 15-22, 15-21, 15-20, 15-19, 15-18, 15-17, 18-30, 18-29, 18-28, 18-27, 18-26, 18-25, 18-24, 18-23, 18-22, 18-21, 18-20, 19-30, 19-29, 19-28, 19-27, 19-26, 19-25, 19-24, 19-23, 19-22, 19-21, 19-20, 20-30, 20-29, 20-28, 20-27, 20-26, 20-25, 20-24, 20-23, 20-22, 20-21, 21-30, 21-29, 21-28, 21-27, 21-26, 21-25, 21-24, 21-23, or 21-22 nucleotides in length. Ranges and lengths intermediate to the above recited ranges and lengths are also contemplated to be part of the invention.

[0386] In some embodiments, the dsRNA is between about 15 and about 20 nucleotides in length, or between about 25 and about 30 nucleotides in length. In general, the dsRNA is long enough to serve as a substrate for the Dicer enzyme. For example, it is well-known in the art that dsRNAs longer than about 21-23 nucleotides in length may serve as substrates for Dicer. As the ordinarily skilled person will also recognize, the region of an RNA targeted for cleavage will most often be part of a larger RNA molecule, often an mRNA molecule. Where relevant, a “part” of an mRNA target is a contiguous sequence of an mRNA target of sufficient length to allow it to be a substrate for RNAi-directed cleavage (i.e., cleavage through a RISC pathway).

[0387] One of skill in the art will also recognize that the duplex region is a primary functional portion of a dsRNA, e.g., a duplex region of about 9 to 36 base pairs, e.g., about 10-36, 11-36, 12-36, 13-36, 14-36, 15-36, 9-35, 10-35, 11-35, 12-35, 13-35, 14-35, 15-35, 9-34, 10-34, 11-34, 12-34, 13-34, 14-34, 15-34, 9-33, 10-33, 11-33, 12-33, 13-33, 14-33, 15-33, 9-32, 10-32, 11-32, 12-32, 13-32, 14-32, 15-32, 9-31, 10-31, 11-31, 12-31, 13-32, 14-31, 15-31, 15-30, 15-29, 15-28, 15-27, 15-26, 15-25, 15-24, 15-23, 15-22, 15-21, 15-20, 15-19, 15-18, 15-17, 18-30, 18-29, 18-28, 18-27, 18-26, 18-25, 18-24, 18-23, 18-22, 18-21, 18-20, 19-30, 19-29, 19-28, 19-27, 19-26, 19-25, 19-24, 19-23, 19-22, 19-21, 19-20, 20-30, 20-29, 20-28, 20-27, 20-26, 20-25, 20-24, 20-23, 20-22, 20-21, 21-30, 21-29, 21-28, 21-27, 21-26, 21-25, 21-24, 21-23, or 21-22 base pairs. Thus, in one embodiment, to the extent that it becomes processed to a functional duplex, of e.g., 15-30 base pairs, that targets a desired RNA for cleavage, an RNA molecule or complex of RNA molecules having a duplex region greater than 30 base pairs is a dsRNA. Thus, an ordinarily skilled artisan will recognize that in one embodiment, a miRNA is a dsRNA. In another embodiment, a dsRNA is not a naturally occurring miRNA. In another embodiment, an iRNA agent useful to target C5 expression is not generated in the target cell by cleavage of a larger dsRNA.

[0388] A dsRNA as described herein can further include one or more single-stranded nucleotide overhangs e.g., 1, 2, 3, or 4 nucleotides. dsRNAs having at least one nucleotide overhang can have unexpectedly superior inhibitory properties relative to their blunt-ended counterparts. A nucleotide overhang can comprise or consist of a nucleotide/nucleoside analog, including a deoxynucleotide/nucleoside. The overhang(s) can be on the sense strand, the antisense strand or any combination thereof. Furthermore, the nucleotide(s) of an overhang can be present on the 5′-end, 3′-end or both ends of either an antisense or sense strand of a dsRNA.

[0389] A dsRNA can be synthesized by standard methods known in the art as further discussed below, e.g., by use of an automated DNA synthesizer, such as are commercially available from, for example, Biosearch, Applied Biosystems, Inc.

[0390] iRNA compounds of the invention may be prepared using a two-step procedure. First, the individual strands of the double-stranded RNA molecule are prepared separately. Then, the component strands are annealed. The individual strands of the siRNA compound can be prepared using solution-phase or solid-phase organic synthesis or both. Organic synthesis offers the advantage that the oligonucleotide strands comprising unnatural or modified nucleotides can be easily prepared. Single-stranded oligonucleotides of the invention can be prepared using solution-phase or solid-phase organic synthesis or both.

[0391] In one aspect, a dsRNA of the invention includes at least two nucleotide sequences, a sense sequence and an anti-sense sequence. The sense strand is selected from the group of sequences provided in any one of Tables 3, 4, 5, 6, 18, 19, 20, 21, and 23, and the corresponding antisense strand of the sense strand is selected from the group of sequences of any one of Tables 3, 4, 5, 6, 18, 19, 20, 21, and 23. In this aspect, one of the two sequences is complementary to the other of the two sequences, with one of the sequences being substantially complementary to a sequence of an mRNA generated in the expression of a C5 gene. As such, in this aspect, a dsRNA will include two oligonucleotides, where one oligonucleotide is described as the sense strand in any one of Tables 3, 4, 5, 6, 18, 19, 20, 21, and 23, and the second oligonucleotide is described as the corresponding antisense strand of the sense strand in any one of Tables 3, 4, 5, 6, 18, 19, 20, 21, and 23. In one embodiment, the substantially complementary sequences of the dsRNA are contained on separate oligonucleotides. In another embodiment, the substantially complementary sequences of the dsRNA are contained on a single oligonucleotide.

[0392] It will be understood that, although some of the sequences in Tables 3, 4, 5, 6, 18, 19, 20, 21, and 23 are described as modified and/or conjugated sequences, the RNA of the iRNA of the invention e.g., a dsRNA of the invention, may comprise any one of the sequences set forth in Tables 3, 4, 5, 6, 18, 19, 20, 21, and 23 that is un-modified, un-conjugated, and/or modified and/or conjugated differently than described therein.

[0393] The skilled person is well aware that dsRNAs having a duplex structure of between about 20 and 23 base pairs, e.g., 21, base pairs have been hailed as particularly effective in inducing RNA interference (Elbashir et al., EMBO 2001, 20:6877-6888). However, others have found that shorter or longer RNA duplex structures can also be effective (Chu and Rana (2007) RNA 14:1714-1719; Kim et al. (2005) Nat Biotech 23:222-226). In the embodiments described above, by virtue of the nature of the oligonucleotide sequences provided in any one of Tables 3, 4, 5, 6, 18, 19, 20, 21, and 23, dsRNAs described herein can include at least one strand of a length of minimally 21 nucleotides. It can be reasonably expected that shorter duplexes having one of the sequences of any one of Tables 3, 4, 5, 6, 18, 19, 20, 21, and 23 minus only a few nucleotides on one or both ends can be similarly effective as compared to the dsRNAs described above. Hence, dsRNAs having a sequence of at least 15, 16, 17, 18, 19, 20, or more contiguous nucleotides derived from one of the sequences of any one of Tables 3, 4, 5, 6, 18, 19, 20, 21, and 23, and differing in their ability to inhibit the expression of a C5 gene by not more than about 5, 10, 15, 20, 25, or 30% inhibition from a dsRNA comprising the full sequence, are contemplated to be within the scope of the present invention.

[0394] In addition, the RNAs provided in any one of Tables 3, 4, 5, 6, 18, 19, 20, 21, and 23 identify a site(s) in a C5 transcript that is susceptible to RISC-mediated cleavage. As such, the present invention further features iRNAs that target within one of these sites. As used herein, an iRNA is said to target within a particular site of an RNA transcript if the iRNA promotes cleavage of the transcript anywhere within that particular site. Such an iRNA will generally include at least about 15 contiguous nucleotides from one of the sequences provided in any one of Tables 3, 4, 5, 6, 18, 19, 20, 21, and 23 coupled to additional nucleotide sequences taken from the region contiguous to the selected sequence in a C5 gene.

[0395] While a target sequence is generally about 15-30 nucleotides in length, there is wide variation in the suitability of particular sequences in this range for directing cleavage of any given target RNA. Various software packages and the guidelines set out herein provide guidance for the identification of optimal target sequences for any given gene target, but an empirical approach can also be taken in which a “window” or “mask” of a given size (as a non-limiting example, 21 nucleotides) is literally or figuratively (including, e.g., in silico) placed on the target RNA sequence to identify sequences in the size range that can serve as target sequences. By moving the sequence “window” progressively one nucleotide upstream or downstream of an initial target sequence location, the next potential target sequence can be identified, until the complete set of possible sequences is identified for any given target size selected. This process, coupled with systematic synthesis and testing of the identified sequences (using assays as described herein or as known in the art) to identify those sequences that perform optimally can identify those RNA sequences that, when targeted with an iRNA agent, mediate the best inhibition of target gene expression. Thus, while the sequences identified, for example, in any one of Tables 3, 4, 5, 6, 18, 19, 20, 21, and 23 represent effective target sequences, it is contemplated that further optimization of inhibition efficiency can be achieved by progressively “walking the window” one nucleotide upstream or downstream of the given sequences to identify sequences with equal or better inhibition characteristics.

[0396] Further, it is contemplated that for any sequence identified, e.g., in any one of Tables 3, 4, 5, 6, 18, 19, 20, 21, and 23, further optimization could be achieved by systematically either adding or removing nucleotides to generate longer or shorter sequences and testing those sequences generated by walking a window of the longer or shorter size up or down the target RNA from that point. Again, coupling this approach to generating new candidate targets with testing for effectiveness of iRNAs based on those target sequences in an inhibition assay as known in the art and/or as described herein can lead to further improvements in the efficiency of inhibition. Further still, such optimized sequences can be adjusted by, e.g., the introduction of modified nucleotides as described herein or as known in the art, addition or changes in overhang, or other modifications as known in the art and/or discussed herein to further optimize the molecule (e.g., increasing serum stability or circulating half-life, increasing thermal stability, enhancing transmembrane delivery, targeting to a particular location or cell type, increasing interaction with silencing pathway enzymes, increasing release from endosomes) as an expression inhibitor.

[0397] An iRNA as described herein can contain one or more mismatches to the target sequence. In one embodiment, an iRNA as described herein contains no more than 3 mismatches. If the antisense strand of the iRNA contains mismatches to a target sequence, it is preferable that the area of mismatch is not located in the center of the region of complementarity. If the antisense strand of the iRNA contains mismatches to the target sequence, it is preferable that the mismatch be restricted to be within the last 5 nucleotides from either the 5′- or 3′-end of the region of complementarity. For example, for a 23 nucleotide iRNA agent the strand which is complementary to a region of a C5 gene, generally does not contain any mismatch within the central 13 nucleotides. The methods described herein or methods known in the art can be used to determine whether an iRNA containing a mismatch to a target sequence is effective in inhibiting the expression of a C5 gene. Consideration of the efficacy of iRNAs with mismatches in inhibiting expression of a C5 gene is important, especially if the particular region of complementarity in a C5 gene is known to have polymorphic sequence variation within the population.

### III. Modified iRNAs of the Invention

[0398] In one embodiment, the RNA of the iRNA of the invention e.g., a dsRNA, is un-modified, and does not comprise, e.g., chemical modifications and/or conjugations known in the art and described herein. In another embodiment, the RNA of an iRNA of the invention, e.g., a dsRNA, is chemically modified to enhance stability or other beneficial characteristics. In certain embodiments of the invention, substantially all of the nucleotides of an iRNA of the invention are modified. In other embodiments of the invention, all of the nucleotides of an iRNA of the invention are modified. iRNAs of the invention in which “substantially all of the nucleotides are modified” are largely but not wholly modified and can include not more than 5, 4, 3, 2, or 1 unmodified nucleotides.

[0399] The nucleic acids featured in the invention can be synthesized and/or modified by methods well established in the art, such as those described in “Current protocols in nucleic acid chemistry,” Beaucage, S. L. et al. (Edrs.), John Wiley & Sons, Inc., New York, N.Y., USA, which is hereby incorporated herein by reference. Modifications include, for example, end modifications, e.g., 5′-end modifications (phosphorylation, conjugation, inverted linkages) or 3′-end modifications (conjugation, DNA nucleotides, inverted linkages, etc.); base modifications, e.g., replacement with stabilizing bases, destabilizing bases, or bases that base pair with an expanded repertoire of partners, removal of bases (abasic nucleotides), or conjugated bases; sugar modifications (e.g., at the 2′-position or 4′-position) or replacement of the sugar; and/or backbone modifications, including modification or replacement of the phosphodiester linkages. Specific examples of iRNA compounds useful in the embodiments described herein include, but are not limited to RNAs containing modified backbones or no natural internucleoside linkages. RNAs having modified backbones include, among others, those that do not have a phosphorus atom in the backbone. For the purposes of this specification, and as sometimes referenced in the art, modified RNAs that do not have a phosphorus atom in their internucleoside backbone can also be considered to be oligonucleosides. In some embodiments, a modified iRNA will have a phosphorus atom in its internucleoside backbone.

[0400] Modified RNA backbones include, for example, phosphorothioates, chiral phosphorothioates, phosphorodithioates, phosphotriesters, aminoalkylphosphotriesters, methyl and other alkyl phosphonates including 3′-alkylene phosphonates and chiral phosphonates, phosphinates, phosphoramidates including 3′-amino phosphoramidate and aminoalkylphosphoramidates, thionophosphoramidates, thionoalkylphosphonates, thionoalkylphosphotriesters, and boranophosphates having normal 3′-5′ linkages, 2′-5′-linked analogs of these, and those having inverted polarity wherein the adjacent pairs of nucleoside units are linked 3′-5′ to 5′-3′ or 2′-5′ to 5′-2′. Various salts, mixed salts and free acid forms are also included.

[0401] Representative U.S. patents that teach the preparation of the above phosphorus-containing linkages include, but are not limited to, U.S. Pat. Nos. 3,687,808; 4,469,863; 4,476,301; 5,023,243; 5,177,195; 5,188,897; 5,264,423; 5,276,019; 5,278,302; 5,286,717; 5,321,131; 5,399,676; 5,405,939; 5,453,496; 5,455,233; 5,466,677; 5,476,925; 5,519,126; 5,536,821; 5,541,316; 5,550,111; 5,563,253; 5,571,799; 5,587,361; 5,625,050; 6,028,188; 6,124,445; 6,160,109; 6,169,170; 6,172,209; 6,239,265; 6,277,603; 6,326,199; 6,346,614; 6,444,423; 6,531,590; 6,534,639; 6,608,035; 6,683,167; 6,858,715; 6,867,294; 6,878,805; 7,015,315; 7,041,816; 7,273,933; 7,321,029; and U.S. Pat. RE39464, the entire contents of each of which are hereby incorporated herein by reference.

[0402] Modified RNA backbones that do not include a phosphorus atom therein have backbones that are formed by short chain alkyl or cycloalkyl internucleoside linkages, mixed heteroatoms and alkyl or cycloalkyl internucleoside linkages, or one or more short chain heteroatomic or heterocyclic internucleoside linkages. These include those having morpholino linkages (formed in part from the sugar portion of a nucleoside); siloxane backbones; sulfide, sulfoxide and sulfone backbones; formacetyl and thioformacetyl backbones; methylene formacetyl and thioformacetyl backbones; alkene containing backbones; sulfamate backbones; methyleneimino and methylenehydrazino backbones; sulfonate and sulfonamide backbones; amide backbones; and others having mixed N, O, S and CH₂ component parts.

[0403] Representative U.S. patents that teach the preparation of the above oligonucleosides include, but are not limited to, U.S. Pat. Nos. 5,034,506; 5,166,315; 5,185,444; 5,214,134; 5,216,141; 5,235,033; 5,64,562; 5,264,564; 5,405,938; 5,434,257; 5,466,677; 5,470,967; 5,489,677; 5,541,307; 5,561,225; 5,596,086; 5,602,240; 5,608,046; 5,610,289; 5,618,704; 5,623,070; 5,663,312; 5,633,360; 5,677,437; and, 5,677,439, the entire contents of each of which are hereby incorporated herein by reference.

[0404] In other embodiments, suitable RNA mimetics are contemplated for use in iRNAs, in which both the sugar and the internucleoside linkage, i.e., the backbone, of the nucleotide units are replaced with novel groups. The base units are maintained for hybridization with an appropriate nucleic acid target compound. One such oligomeric compound, an RNA mimetic that has been shown to have excellent hybridization properties, is referred to as a peptide nucleic acid (PNA). In PNA compounds, the sugar backbone of an RNA is replaced with an amide containing backbone, in particular an aminoethylglycine backbone. The nucleobases are retained and are bound directly or indirectly to aza nitrogen atoms of the amide portion of the backbone. Representative U.S. patents that teach the preparation of PNA compounds include, but are not limited to, U.S. Pat. Nos. 5,539,082; 5,714,331; and 5,719,262, the entire contents of each of which are hereby incorporated herein by reference. Additional PNA compounds suitable for use in the iRNAs of the invention are described in, for example, in Nielsen et al., Science, 1991, 254, 1497-1500.

[0405] Some embodiments featured in the invention include RNAs with phosphorothioate backbones and oligonucleosides with heteroatom backbones, and in particular —CH₂—NH—CH₂—, —CH₂—N(CH₃)—O—CH₂— [known as a methylene (methylimino) or MMI backbone], —CH₂—O—N(CH₃)—CH₂—, —CH₂—N(CH₃)—N(CH₃)—CH₂— and —N(CH₃)—CH₂—CH₂— [wherein the native phosphodiester backbone is represented as —O—P—O—CH₂—] of the above-referenced U.S. Pat. No. 5,489,677, and the amide backbones of the above-referenced U.S. Pat. No. 5,602,240. In some embodiments, the RNAs featured herein have morpholino backbone structures of the above-referenced U.S. Pat. No. 5,034,506.

[0406] Modified RNAs can also contain one or more substituted sugar moieties. The iRNAs, e.g., dsRNAs, featured herein can include one of the following at the 2′-position: OH; F; O-, S-, or N-alkyl; O-, S-, or N-alkenyl; O-, S- or N-alkynyl; or O-alkyl-O-alkyl, wherein the alkyl, alkenyl and alkynyl can be substituted or unsubstituted C₁ to C₁₀ alkyl or C₂ to C₁₀ alkenyl and alkynyl. Exemplary suitable modifications include O[(CH₂)ₙO]ₘCH₃, O(CH₂)ₙOCH₃, O(CH₂)ₙNH₂, O(CH₂)ₙCH₃, O(CH₂)ₙONH₂, and O(CH₂)ₙON[(CH₂)ₙCH₃)]₂, where n and m are from 1 to about 10. In other embodiments, dsRNAs include one of the following at the 2′ position: C₁ to C₁₀ lower alkyl, substituted lower alkyl, alkaryl, aralkyl, O-alkaryl or O-aralkyl, SH, SCH₃, OCN, Cl, Br, CN, CF₃, OCF₃, SOCH₃, SO₂CH₃, ONO₂, NO₂, N₃, NH₂, heterocycloalkyl, heterocycloalkaryl, aminoalkylamino, polyalkylamino, substituted silyl, an RNA cleaving group, a reporter group, an intercalator, a group for improving the pharmacokinetic properties of an iRNA, or a group for improving the pharmacodynamic properties of an iRNA, and other substituents having similar properties. In some embodiments, the modification includes a 2′-methoxyethoxy (2′-O—CH₂CH₂OCH₃, also known as 2′-O-(2-methoxyethyl) or 2′-MOE) (Martin et al., Helv. Chin. Acta, 1995, 78:486-504) i.e., an alkoxy-alkoxy group. Another exemplary modification is 2′-dimethylaminooxyethoxy, i.e., a O(CH₂)₂ON(CH₃)₂ group, also known as 2′-DMAOE, as described in examples herein below, and 2′-dimethylaminoethoxyethoxy (also known in the art as 2′-O-dimethylaminoethoxyethyl or 2′-DMAEOE), i.e., 2′-O—CH₂—O—CH₂—N(CH₂)₂.

[0407] Other modifications include 2′-methoxy (2′-OCH₃), 2′-aminopropoxy (2′-OCH₂CH₂CH₂NH₂) and 2′-fluoro (2′-F) Similar modifications can also be made at other positions on the RNA of an iRNA, particularly the 3′ position of the sugar on the 3′ terminal nucleotide or in 2′-5′ linked dsRNAs and the 5′ position of 5′ terminal nucleotide. iRNAs can also have sugar mimetics such as cyclobutyl moieties in place of the pentofuranosyl sugar. Representative U.S. patents that teach the preparation of such modified sugar structures include, but are not limited to, U.S. Pat. Nos. 4,981,957; 5,118,800; 5,319,080; 5,359,044; 5,393,878; 5,446,137; 5,466,786; 5,514,785; 5,519,134; 5,567,811; 5,576,427; 5,591,722; 5,597,909; 5,610,300; 5,627,053; 5,639,873; 5,646,265; 5,658,873; 5,670,633; and 5,700,920, certain of which are commonly owned with the instant application. The entire contents of each of the foregoing are hereby incorporated herein by reference.

[0408] An iRNA can also include nucleobase (often referred to in the art simply as “base”) modifications or substitutions. As used herein, “unmodified” or “natural” nucleobases include the purine bases adenine (A) and guanine (G), and the pyrimidine bases thymine (T), cytosine (C) and uracil (U). Modified nucleobases include other synthetic and natural nucleobases such as deoxy-thymine (dT), 5-methylcytosine (5-me-C), 5-hydroxymethyl cytosine, xanthine, hypoxanthine, 2-aminoadenine, 6-methyl and other alkyl derivatives of adenine and guanine, 2-propyl and other alkyl derivatives of adenine and guanine, 2-thiouracil, 2-thiothymine and 2-thiocytosine, 5-halouracil and cytosine, 5-propynyl uracil and cytosine, 6-azo uracil, cytosine and thymine, 5-uracil (pseudouracil), 4-thiouracil, 8-halo, 8-amino, 8-thiol, 8-thioalkyl, 8-hydroxyl anal other 8-substituted adenines and guanines, 5-halo, particularly 5-bromo, 5-trifluoromethyl and other 5-substituted uracils and cytosines, 7-methylguanine and 7-methyladenine, 8-azaguanine and 8-azaadenine, 7-deazaguanine and 7-daazaadenine and 3-deazaguanine and 3-deazaadenine. Further nucleobases include those disclosed in U.S. Pat. No. 3,687,808, those disclosed in Modified Nucleosides in Biochemistry, Biotechnology and Medicine, Herdewijn, P. ed. Wiley-VCH, 2008; those disclosed in The Concise Encyclopedia Of Polymer Science And Engineering, pages 858-859, Kroschwitz, J. L, ed. John Wiley & Sons, 1990, these disclosed by Englisch et al., Angewandte Chemie, International Edition, 1991, 30, 613, and those disclosed by Sanghvi, Y S., Chapter 15, dsRNA Research and Applications, pages 289-302, Crooke, S. T. and Lebleu, B., Ed., CRC Press, 1993. Certain of these nucleobases are particularly useful for increasing the binding affinity of the oligomeric compounds featured in the invention. These include 5-substituted pyrimidines, 6-azapyrimidines and N-2, N-6 and 0-6 substituted purines, including 2-aminopropyladenine, 5-propynyluracil and 5-propynylcytosine. 5-methylcytosine substitutions have been shown to increase nucleic acid duplex stability by 0.6-1.2° C. (Sanghvi, Y. S., Crooke, S. T. and Lebleu, B., Eds., dsRNA Research and Applications, CRC Press, Boca Raton, 1993, pp. 276-278) and are exemplary base substitutions, even more particularly when combined with 2′-O-methoxyethyl sugar modifications.

[0409] Representative U.S. patents that teach the preparation of certain of the above noted modified nucleobases as well as other modified nucleobases include, but are not limited to, the above noted U.S. Pat. Nos. 3,687,808, 4,845,205; 5,130,30; 5,134,066; 5,175,273; 5,367,066; 5,432,272; 5,457,187; 5,459,255; 5,484,908; 5,502,177; 5,525,711; 5,552,540; 5,587,469; 5,594,121, 5,596,091; 5,614,617; 5,681,941; 5,750,692; 6,015,886; 6,147,200; 6,166,197; 6,222,025; 6,235,887; 6,380,368; 6,528,640; 6,639,062; 6,617,438; 7,045,610; 7,427,672; and 7,495,088, the entire contents of each of which are hereby incorporated herein by reference.

[0410] The RNA of an iRNA can also be modified to include one or more bicyclic sugar moities. A “bicyclic sugar” is a furanosyl ring modified by the bridging of two atoms. A “bicyclic nucleoside” (“BNA”) is a nucleoside having a sugar moiety comprising a bridge connecting two carbon atoms of the sugar ring, thereby forming a bicyclic ring system. In certain embodiments, the bridge connects the 4′-carbon and the 2′-carbon of the sugar ring. Thus, in some embodiments an agent of the invention may include the RNA of an iRNA can also be modified to include one or more locked nucleic acids (LNA). A locked nucleic acid is a nucleotide having a modified ribose moiety in which the ribose moiety comprises an extra bridge connecting the 2′ and 4′ carbons. In other words, an LNA is a nucleotide comprising a bicyclic sugar moiety comprising a 4′-CH2-O-2′ bridge. This structure effectively “locks” the ribose in the 3′-endo structural conformation. The addition of locked nucleic acids to siRNAs has been shown to increase siRNA stability in serum, and to reduce off-target effects (Elmen, J. et al., (2005) Nucleic Acids Research 33(1):439-447; Mook, O R. et al., (2007) Mol Canc Ther 6(3):833-843; Grunweller, A. et al., (2003) Nucleic Acids Research 31(12):3185-3193).

[0411] Examples of bicyclic nucleosides for use in the polynucleotides of the invention include without limitation nucleosides comprising a bridge between the 4′ and the 2′ ribosyl ring atoms. In certain embodiments, the antisense polynucleotide agents of the invention include one or more bicyclic nucleosides comprising a 4′ to 2′ bridge. Examples of such 4′ to 2′ bridged bicyclic nucleosides, include but are not limited to 4′-(CH2)-O-2′ (LNA); 4′-(CH2)-S-2′; 4′-(CH2)2-O-2′ (ENA); 4′-CH(CH3)-O-2′ (also referred to as “constrained ethyl” or “cEt”) and 4′-CH(CH2OCH3)-O-2′ (and analogs thereof; see, e.g., U.S. Pat. No. 7,399,845); 4′-C(CH3)(CH3)-O-2′ (and analogs thereof; see e.g., U.S. Pat. No. 8,278,283); 4′-CH2-N(OCH3)-2′ (and analogs thereof; see e.g., U.S. Pat. No. 8,278,425); 4′-CH2-O—N(CH3)-2′ (see, e.g., U.S. Patent Publication No. 2004/0171570); 4′-CH2-N(R)—O-2′, wherein R is H, C1-C12 alkyl, or a protecting group (see, e.g., U.S. Pat. No. 7,427,672); 4′-CH2-C(H)(CH3)-2′ (see, e.g., Chattopadhyaya et al., J. Org. Chem., 2009, 74, 118-134); and 4′-CH2-C(═CH2)-2′ (and analogs thereof; see, e.g., U.S. Pat. No. 8,278,426). The entire contents of each of the foregoing are hereby incorporated herein by reference.

[0412] Additional representative U.S. patents and US Patent Publications that teach the preparation of locked nucleic acid nucleotides include, but are not limited to, the following: U.S. Pat. Nos. 6,268,490; 6,525,191; 6,670,461; 6,770,748; 6,794,499; 6,998,484; 7,053,207; 7,034,133; 7,084,125; 7,399,845; 7,427,672; 7,569,686; 7,741,457; 8,022,193; 8,030,467; 8,278,425; 8,278,426; 8,278,283; US 2008/0039618; and US 2009/0012281, the entire contents of each of which are hereby incorporated herein by reference.

[0413] Any of the foregoing bicyclic nucleosides can be prepared having one or more stereochemical sugar configurations including for example α-L-ribofuranose and β-D-ribofuranose (see WO 99/14226).

[0414] The RNA of an iRNA can also be modified to include one or more constrained ethyl nucleotides. As used herein, a “constrained ethyl nucleotide” or “cEt” is a locked nucleic acid comprising a bicyclic sugar moiety comprising a 4′-CH(CH3)-O-2′ bridge. In one embodiment, a constrained ethyl nucleotide is in the S conformation referred to herein as “S-cEt.”

[0415] An iRNA of the invention may also include one or more “conformationally restricted nucleotides” (“CRN”). CRN are nucleotide analogs with a linker connecting the C2′ and C4′ carbons of ribose or the C3 and -C5′ carbons of ribose. CRN lock the ribose ring into a stable conformation and increase the hybridization affinity to mRNA. The linker is of sufficient length to place the oxygen in an optimal position for stability and affinity resulting in less ribose ring puckering.

[0416] Representative publications that teach the preparation of certain of the above noted CRN include, but are not limited to, US Patent Publication No. 2013/0190383; and PCT publication WO 2013/036868, the entire contents of each of which are hereby incorporated herein by reference.

[0417] One or more of the nucleotides of an iRNA of the invention may also include a hydroxymethyl substituted nucleotide. A “hydroxymethyl substituted nucleotide” is an acyclic 2′-3′-seco-nucleotide, also referred to as an “unlocked nucleic acid” (“UNA”) modification

[0418] Representative U.S. publications that teach the preparation of UNA include, but are not limited to, U.S. Pat. No. 8,314,227; and US Patent Publication Nos. 2013/0096289; 2013/0011922; and 2011/0313020, the entire contents of each of which are hereby incorporated herein by reference.

[0419] Potentially stabilizing modifications to the ends of RNA molecules can include N-(acetylaminocaproyl)-4-hydroxyprolinol (Hyp-C6-NHAc), N-(caproyl-4-hydroxyprolinol (Hyp-C6), N-(acetyl-4-hydroxyprolinol (Hyp-NHAc), thymidine-2′-O-deoxythymidine (ether), N-(aminocaproyl)-4-hydroxyprolinol (Hyp-C6-amino), 2-docosanoyl-uridine-3″-phosphate, inverted base dT(idT) and others. Disclosure of this modification can be found in PCT Publication No. WO 2011/005861.

[0420] A. Modified iRNAs Comprising Motifs of the Invention

[0421] In certain aspects of the invention, the double-stranded RNAi agents of the invention include agents with chemical modifications as disclosed, for example, in U.S. Provisional Application No. 61/561,710, filed on Nov. 18, 2011, or in PCT/US2012/065691, filed on Nov. 16, 2012, the entire contents of each of which are incorporated herein by reference.

[0422] As shown herein and in Provisional Application No. 61/561,710 or PCT Application No. PCT/US2012/065691, a superior result may be obtained by introducing one or more motifs of three identical modifications on three consecutive nucleotides into a sense strand and/or antisense strand of an RNAi agent, particularly at or near the cleavage site. In some embodiments, the sense strand and antisense strand of the RNAi agent may otherwise be completely modified. The introduction of these motifs interrupts the modification pattern, if present, of the sense and/or antisense strand. The RNAi agent may be optionally conjugated with a GalNAc derivative ligand, for instance on the sense strand. The resulting RNAi agents present superior gene silencing activity.

[0423] More specifically, it has been surprisingly discovered that when the sense strand and antisense strand of the double-stranded RNAi agent are completely modified to have one or more motifs of three identical modifications on three consecutive nucleotides at or near the cleavage site of at least one strand of an RNAi agent, the gene silencing activity of the RNAi agent was superiorly enhanced.

[0424] Accordingly, the invention provides double-stranded RNAi agents capable of inhibiting the expression of a target gene (i.e., a complement component C5 (C5) gene) in vivo. The RNAi agent comprises a sense strand and an antisense strand. Each strand of the RNAi agent may range from 12-30 nucleotides in length. For example, each strand may be between 14-30 nucleotides in length, 17-30 nucleotides in length, 25-30 nucleotides in length, 27-30 nucleotides in length, 17-23 nucleotides in length, 17-21 nucleotides in length, 17-19 nucleotides in length, 19-25 nucleotides in length, 19-23 nucleotides in length, 19-21 nucleotides in length, 21-25 nucleotides in length, or 21-23 nucleotides in length.

[0425] The sense strand and antisense strand typically form a duplex double stranded RNA (“dsRNA”), also referred to herein as an “RNAi agent.” The duplex region of an RNAi agent may be 12-30 nucleotide pairs in length. For example, the duplex region can be between 14-30 nucleotide pairs in length, 17-30 nucleotide pairs in length, 27-30 nucleotide pairs in length, 17-23 nucleotide pairs in length, 17-21 nucleotide pairs in length, 17-19 nucleotide pairs in length, 19-25 nucleotide pairs in length, 19-23 nucleotide pairs in length, 19-21 nucleotide pairs in length, 21-25 nucleotide pairs in length, or 21-23 nucleotide pairs in length. In another example, the duplex region is selected from 15, 16, 17, 18, 19, 20, 21, 22, 23, 24, 25, 26, and 27 nucleotides in length.

[0426] In one embodiment, the RNAi agent may contain one or more overhang regions and/or capping groups at the 3′-end, 5′-end, or both ends of one or both strands. The overhang can be 1-6 nucleotides in length, for instance 2-6 nucleotides in length, 1-5 nucleotides in length, 2-5 nucleotides in length, 1-4 nucleotides in length, 2-4 nucleotides in length, 1-3 nucleotides in length, 2-3 nucleotides in length, or 1-2 nucleotides in length. The overhangs can be the result of one strand being longer than the other, or the result of two strands of the same length being staggered. The overhang can form a mismatch with the target mRNA or it can be complementary to the gene sequences being targeted or can be another sequence. The first and second strands can also be joined, e.g., by additional bases to form a hairpin, or by other non-base linkers.

[0427] In one embodiment, the nucleotides in the overhang region of the RNAi agent can each independently be a modified or unmodified nucleotide including, but no limited to 2′-sugar modified, such as, 2-F, 2′-Omethyl, thymidine (T), 2′-O-methoxyethyl-5-methyluridine (Teo), 2′-O-methoxyethyladenosine (Aeo), 2′-O-methoxyethyl-5-methylcytidine (m5Ceo), and any combinations thereof. For example, TT can be an overhang sequence for either end on either strand. The overhang can form a mismatch with the target mRNA or it can be complementary to the gene sequences being targeted or can be another sequence.

[0428] The 5′- or 3′-overhangs at the sense strand, antisense strand or both strands of the RNAi agent may be phosphorylated. In some embodiments, the overhang region(s) contains two nucleotides having a phosphorothioate between the two nucleotides, where the two nucleotides can be the same or different. In one embodiment, the overhang is present at the 3′-end of the sense strand, antisense strand, or both strands. In one embodiment, this 3′-overhang is present in the antisense strand. In one embodiment, this 3′-overhang is present in the sense strand.

[0429] The RNAi agent may contain only a single overhang, which can strengthen the interference activity of the RNAi, without affecting its overall stability. For example, the single-stranded overhang may be located at the 3′-terminal end of the sense strand or, alternatively, at the 3′-terminal end of the antisense strand. The RNAi may also have a blunt end, located at the 5′-end of the antisense strand (or the 3′-end of the sense strand) or vice versa. Generally, the antisense strand of the RNAi has a nucleotide overhang at the 3′-end, and the 5′-end is blunt. While not wishing to be bound by theory, the asymmetric blunt end at the 5′-end of the antisense strand and 3′-end overhang of the antisense strand favor the guide strand loading into RISC process.

[0430] In one embodiment, the RNAi agent is a double ended bluntmer of 19 nucleotides in length, wherein the sense strand contains at least one motif of three 2′-F modifications on three consecutive nucleotides at positions 7, 8, 9 from the 5′end. The antisense strand contains at least one motif of three 2′-O-methyl modifications on three consecutive nucleotides at positions 11, 12, 13 from the 5′end.

[0431] In another embodiment, the RNAi agent is a double ended bluntmer of 20 nucleotides in length, wherein the sense strand contains at least one motif of three 2′-F modifications on three consecutive nucleotides at positions 8, 9, 10 from the 5′end. The antisense strand contains at least one motif of three 2′-O-methyl modifications on three consecutive nucleotides at positions 11, 12, 13 from the 5′end.

[0432] In yet another embodiment, the RNAi agent is a double ended bluntmer of 21 nucleotides in length, wherein the sense strand contains at least one motif of three 2′-F modifications on three consecutive nucleotides at positions 9, 10, 11 from the 5′end. The antisense strand contains at least one motif of three 2′-O-methyl modifications on three consecutive nucleotides at positions 11, 12, 13 from the 5′end.

[0433] In one embodiment, the RNAi agent comprises a 21 nucleotide sense strand and a 23 nucleotide antisense strand, wherein the sense strand contains at least one motif of three 2′-F modifications on three consecutive nucleotides at positions 9, 10, 11 from the 5′end; the antisense strand contains at least one motif of three 2′-O-methyl modifications on three consecutive nucleotides at positions 11, 12, 13 from the 5′end, wherein one end of the RNAi agent is blunt, while the other end comprises a 2 nucleotide overhang. Preferably, the 2 nucleotide overhang is at the 3′-end of the antisense strand. When the 2 nucleotide overhang is at the 3′-end of the antisense strand, there may be two phosphorothioate internucleotide linkages between the terminal three nucleotides, wherein two of the three nucleotides are the overhang nucleotides, and the third nucleotide is a paired nucleotide next to the overhang nucleotide. In one embodiment, the RNAi agent additionally has two phosphorothioate internucleotide linkages between the terminal three nucleotides at both the 5′-end of the sense strand and at the 5′-end of the antisense strand. In one embodiment, every nucleotide in the sense strand and the antisense strand of the RNAi agent, including the nucleotides that are part of the motifs are modified nucleotides. In one embodiment each residue is independently modified with a 2′-O-methyl or 3′-fluoro, e.g., in an alternating motif. Optionally, the RNAi agent further comprises a ligand (preferably GalNAc₃).

[0434] In one embodiment, the RNAi agent comprises a sense and an antisense strand, wherein the sense strand is 25-30 nucleotide residues in length, wherein starting from the 5′ terminal nucleotide (position 1) positions 1 to 23 of the first strand comprise at least 8 ribonucleotides; the antisense strand is 36-66 nucleotide residues in length and, starting from the 3′ terminal nucleotide, comprises at least 8 ribonucleotides in the positions paired with positions 1-23 of sense strand to form a duplex; wherein at least the 3′ terminal nucleotide of antisense strand is unpaired with sense strand, and up to 6 consecutive 3′ terminal nucleotides are unpaired with sense strand, thereby forming a 3′ single stranded overhang of 1-6 nucleotides; wherein the 5′ terminus of antisense strand comprises from 10-30 consecutive nucleotides which are unpaired with sense strand, thereby forming a 10-30 nucleotide single stranded 5′ overhang; wherein at least the sense strand 5′ terminal and 3′ terminal nucleotides are base paired with nucleotides of antisense strand when sense and antisense strands are aligned for maximum complementarity, thereby forming a substantially duplexed region between sense and antisense strands; and antisense strand is sufficiently complementary to a target RNA along at least 19 ribonucleotides of antisense strand length to reduce target gene expression when the double stranded nucleic acid is introduced into a mammalian cell; and wherein the sense strand contains at least one motif of three 2′-F modifications on three consecutive nucleotides, where at least one of the motifs occurs at or near the cleavage site. The antisense strand contains at least one motif of three 2′-O-methyl modifications on three consecutive nucleotides at or near the cleavage site.

[0435] In one embodiment, the RNAi agent comprises sense and antisense strands, wherein the RNAi agent comprises a first strand having a length which is at least 25 and at most 29 nucleotides and a second strand having a length which is at most 30 nucleotides with at least one motif of three 2′-O-methyl modifications on three consecutive nucleotides at position 11, 12, 13 from the 5′ end; wherein the 3′ end of the first strand and the 5′ end of the second strand form a blunt end and the second strand is 1-4 nucleotides longer at its 3′ end than the first strand, wherein the duplex region which is at least 25 nucleotides in length, and the second strand is sufficiently complementary to a target mRNA along at least 19 nucleotide of the second strand length to reduce target gene expression when the RNAi agent is introduced into a mammalian cell, and wherein dicer cleavage of the RNAi agent preferentially results in an siRNA comprising the 3′ end of the second strand, thereby reducing expression of the target gene in the mammal. Optionally, the RNAi agent further comprises a ligand.

[0436] In one embodiment, the sense strand of the RNAi agent contains at least one motif of three identical modifications on three consecutive nucleotides, where one of the motifs occurs at the cleavage site in the sense strand.

[0437] In one embodiment, the antisense strand of the RNAi agent can also contain at least one motif of three identical modifications on three consecutive nucleotides, where one of the motifs occurs at or near the cleavage site in the antisense strand

[0438] For an RNAi agent having a duplex region of 17-23 nucleotide in length, the cleavage site of the antisense strand is typically around the 10, 11 and 12 positions from the 5′-end. Thus the motifs of three identical modifications may occur at the 9, 10, 11 positions; 10, 11, 12 positions; 11, 12, 13 positions; 12, 13, 14 positions; or 13, 14, 15 positions of the antisense strand, the count starting from the 1^{st} nucleotide from the 5′-end of the antisense strand, or, the count starting from the 1^{st} paired nucleotide within the duplex region from the 5′-end of the antisense strand. The cleavage site in the antisense strand may also change according to the length of the duplex region of the RNAi from the 5′-end.

[0439] The sense strand of the RNAi agent may contain at least one motif of three identical modifications on three consecutive nucleotides at the cleavage site of the strand; and the antisense strand may have at least one motif of three identical modifications on three consecutive nucleotides at or near the cleavage site of the strand. When the sense strand and the antisense strand form a dsRNA duplex, the sense strand and the antisense strand can be so aligned that one motif of the three nucleotides on the sense strand and one motif of the three nucleotides on the antisense strand have at least one nucleotide overlap, i.e., at least one of the three nucleotides of the motif in the sense strand forms a base pair with at least one of the three nucleotides of the motif in the antisense strand. Alternatively, at least two nucleotides may overlap, or all three nucleotides may overlap.

[0440] In one embodiment, the sense strand of the RNAi agent may contain more than one motif of three identical modifications on three consecutive nucleotides. The first motif may occur at or near the cleavage site of the strand and the other motifs may be a wing modification. The term “wing modification” herein refers to a motif occurring at another portion of the strand that is separated from the motif at or near the cleavage site of the same strand. The wing modification is either adjacent to the first motif or is separated by at least one or more nucleotides. When the motifs are immediately adjacent to each other then the chemistry of the motifs are distinct from each other and when the motifs are separated by one or more nucleotide than the chemistries can be the same or different. Two or more wing modifications may be present. For instance, when two wing modifications are present, each wing modification may occur at one end relative to the first motif which is at or near cleavage site or on either side of the lead motif.

[0441] Like the sense strand, the antisense strand of the RNAi agent may contain more than one motifs of three identical modifications on three consecutive nucleotides, with at least one of the motifs occurring at or near the cleavage site of the strand. This antisense strand may also contain one or more wing modifications in an alignment similar to the wing modifications that may be present on the sense strand.

[0442] In one embodiment, the wing modification on the sense strand or antisense strand of the RNAi agent typically does not include the first one or two terminal nucleotides at the 3′-end, 5′-end or both ends of the strand.

[0443] In another embodiment, the wing modification on the sense strand or antisense strand of the RNAi agent typically does not include the first one or two paired nucleotides within the duplex region at the 3′-end, 5′-end or both ends of the strand.

[0444] When the sense strand and the antisense strand of the RNAi agent each contain at least one wing modification, the wing modifications may fall on the same end of the duplex region, and have an overlap of one, two or three nucleotides.

[0445] When the sense strand and the antisense strand of the RNAi agent each contain at least two wing modifications, the sense strand and the antisense strand can be so aligned that two modifications each from one strand fall on one end of the duplex region, having an overlap of one, two or three nucleotides; two modifications each from one strand fall on the other end of the duplex region, having an overlap of one, two or three nucleotides; two modifications one strand fall on each side of the lead motif, having an overlap of one, two or three nucleotides in the duplex region.

[0446] In one embodiment, every nucleotide in the sense strand and antisense strand of the RNAi agent, including the nucleotides that are part of the motifs, may be modified. Each nucleotide may be modified with the same or different modification which can include one or more alteration of one or both of the non-linking phosphate oxygens and/or of one or more of the linking phosphate oxygens; alteration of a constituent of the ribose sugar, e.g., of the 2′ hydroxyl on the ribose sugar; wholesale replacement of the phosphate moiety with “dephospho” linkers; modification or replacement of a naturally occurring base; and replacement or modification of the ribose-phosphate backbone.

[0447] As nucleic acids are polymers of subunits, many of the modifications occur at a position which is repeated within a nucleic acid, e.g., a modification of a base, or a phosphate moiety, or a non-linking O of a phosphate moiety. In some cases the modification will occur at all of the subject positions in the nucleic acid but in many cases it will not. By way of example, a modification may only occur at a 3′ or 5′ terminal position, may only occur in a terminal region, e.g., at a position on a terminal nucleotide or in the last 2, 3, 4, 5, or 10 nucleotides of a strand. A modification may occur in a double strand region, a single strand region, or in both. A modification may occur only in the double strand region of a RNA or may only occur in a single strand region of a RNA. For example, a phosphorothioate modification at a non-linking O position may only occur at one or both termini, may only occur in a terminal region, e.g., at a position on a terminal nucleotide or in the last 2, 3, 4, 5, or 10 nucleotides of a strand, or may occur in double strand and single strand regions, particularly at termini. The 5′ end or ends can be phosphorylated.

[0448] It may be possible, e.g., to enhance stability, to include particular bases in overhangs, or to include modified nucleotides or nucleotide surrogates, in single strand overhangs, e.g., in a 5′ or 3′ overhang, or in both. For example, it can be desirable to include purine nucleotides in overhangs. In some embodiments all or some of the bases in a 3′ or 5′ overhang may be modified, e.g., with a modification described herein. Modifications can include, e.g., the use of modifications at the 2′ position of the ribose sugar with modifications that are known in the art, e.g., the use of deoxyribonucleotides, 2′-deoxy-2′-fluoro (2′-F) or 2′-O-methyl modified instead of the ribosugar of the nucleobase, and modifications in the phosphate group, e.g., phosphorothioate modifications. Overhangs need not be homologous with the target sequence.

[0449] In one embodiment, each residue of the sense strand and antisense strand is independently modified with LNA, HNA, CeNA, 2′-methoxyethyl, 2′-O-methyl, 2′-O-allyl, 2′-C-allyl, 2′-deoxy, 2′-hydroxyl, or 2′-fluoro. The strands can contain more than one modification. In one embodiment, each residue of the sense strand and antisense strand is independently modified with 2′-O-methyl or 2′-fluoro.

[0450] At least two different modifications are typically present on the sense strand and antisense strand. Those two modifications may be the 2′-O-methyl or 2′-fluoro modifications, or others.

[0451] In one embodiment, the Nₐ and/or N_{b} comprise modifications of an alternating pattern. The term “alternating motif” as used herein refers to a motif having one or more modifications, each modification occurring on alternating nucleotides of one strand. The alternating nucleotide may refer to one per every other nucleotide or one per every three nucleotides, or a similar pattern. For example, if A, B and C each represent one type of modification to the nucleotide, the alternating motif can be “ABABABABABAB . . . ,” “AABBAABBAABB . . . ,” “AABAABAABAAB . . . ,” “AAABAAABAAAB . . . ,” “AAABBBAAABBB . . . ,” or “ABCABCABCABC . . . ,” etc.

[0452] The type of modifications contained in the alternating motif may be the same or different. For example, if A, B, C, D each represent one type of modification on the nucleotide, the alternating pattern, i.e., modifications on every other nucleotide, may be the same, but each of the sense strand or antisense strand can be selected from several possibilities of modifications within the alternating motif such as “ABABAB . . . ”, “ACACAC . . . ” “BDBDBD . . . ” or “CDCDCD . . . ,” etc.

[0453] In one embodiment, the RNAi agent of the invention comprises the modification pattern for the alternating motif on the sense strand relative to the modification pattern for the alternating motif on the antisense strand is shifted. The shift may be such that the modified group of nucleotides of the sense strand corresponds to a differently modified group of nucleotides of the antisense strand and vice versa. For example, the sense strand when paired with the antisense strand in the dsRNA duplex, the alternating motif in the sense strand may start with “ABABAB” from 5′-3′ of the strand and the alternating motif in the antisense strand may start with “BABABA” from 5′-3′ of the strand within the duplex region. As another example, the alternating motif in the sense strand may start with “AABBAABB” from 5′-3′ of the strand and the alternating motif in the antisense strand may start with “BBAABBAA” from 5′-3′ of the strand within the duplex region, so that there is a complete or partial shift of the modification patterns between the sense strand and the antisense strand.

[0454] In one embodiment, the RNAi agent comprises the pattern of the alternating motif of 2′-O-methyl modification and 2′-F modification on the sense strand initially has a shift relative to the pattern of the alternating motif of 2′-O-methyl modification and 2′-F modification on the antisense strand initially, i.e., the 2′-O-methyl modified nucleotide on the sense strand base pairs with a 2′-F modified nucleotide on the antisense strand and vice versa. The 1 position of the sense strand may start with the 2′-F modification, and the 1 position of the antisense strand may start with the 2′-O-methyl modification.

[0455] The introduction of one or more motifs of three identical modifications on three consecutive nucleotides to the sense strand and/or antisense strand interrupts the initial modification pattern present in the sense strand and/or antisense strand. This interruption of the modification pattern of the sense and/or antisense strand by introducing one or more motifs of three identical modifications on three consecutive nucleotides to the sense and/or antisense strand surprisingly enhances the gene silencing activity to the target gene.

[0456] In one embodiment, when the motif of three identical modifications on three consecutive nucleotides is introduced to any of the strands, the modification of the nucleotide next to the motif is a different modification than the modification of the motif. For example, the portion of the sequence containing the motif is “ . . . NₐYYYN_{b} . . . ,” where “Y” represents the modification of the motif of three identical modifications on three consecutive nucleotide, and “Nₐ” and “N_{b}” represent a modification to the nucleotide next to the motif “YYY” that is different than the modification of Y, and where Nₐ and N_{b} can be the same or different modifications. Alternatively, Nₐ and/or N_{b} may be present or absent when there is a wing modification present.

[0457] The RNAi agent may further comprise at least one phosphorothioate or methylphosphonate internucleotide linkage. The phosphorothioate or methylphosphonate internucleotide linkage modification may occur on any nucleotide of the sense strand or antisense strand or both strands in any position of the strand. For instance, the internucleotide linkage modification may occur on every nucleotide on the sense strand and/or antisense strand; each internucleotide linkage modification may occur in an alternating pattern on the sense strand and/or antisense strand; or the sense strand or antisense strand may contain both internucleotide linkage modifications in an alternating pattern. The alternating pattern of the internucleotide linkage modification on the sense strand may be the same or different from the antisense strand, and the alternating pattern of the internucleotide linkage modification on the sense strand may have a shift relative to the alternating pattern of the internucleotide linkage modification on the antisense strand. In one embodiment, a double-stranded RNAi agent comprises 6-8 phosphorothioate internucleotide linkages. In one embodiment, the antisense strand comprises two phosphorothioate internucleotide linkages at the 5′-terminus and two phosphorothioate internucleotide linkages at the 3′-terminus, and the sense strand comprises at least two phosphorothioate internucleotide linkages at either the 5′-terminus or the 3′-terminus.

[0458] In one embodiment, the RNAi comprises a phosphorothioate or methylphosphonate internucleotide linkage modification in the overhang region. For example, the overhang region may contain two nucleotides having a phosphorothioate or methylphosphonate internucleotide linkage between the two nucleotides. Internucleotide linkage modifications also may be made to link the overhang nucleotides with the terminal paired nucleotides within the duplex region. For example, at least 2, 3, 4, or all the overhang nucleotides may be linked through phosphorothioate or methylphosphonate internucleotide linkage, and optionally, there may be additional phosphorothioate or methylphosphonate internucleotide linkages linking the overhang nucleotide with a paired nucleotide that is next to the overhang nucleotide. For instance, there may be at least two phosphorothioate internucleotide linkages between the terminal three nucleotides, in which two of the three nucleotides are overhang nucleotides, and the third is a paired nucleotide next to the overhang nucleotide. These terminal three nucleotides may be at the 3′-end of the antisense strand, the 3′-end of the sense strand, the 5′-end of the antisense strand, and/or the 5′end of the antisense strand.

[0459] In one embodiment, the 2 nucleotide overhang is at the 3′-end of the antisense strand, and there are two phosphorothioate internucleotide linkages between the terminal three nucleotides, wherein two of the three nucleotides are the overhang nucleotides, and the third nucleotide is a paired nucleotide next to the overhang nucleotide. Optionally, the RNAi agent may additionally have two phosphorothioate internucleotide linkages between the terminal three nucleotides at both the 5′-end of the sense strand and at the 5′-end of the antisense strand.

[0460] In one embodiment, the RNAi agent comprises mismatch(es) with the target, within the duplex, or combinations thereof. The mismatch may occur in the overhang region or the duplex region. The base pair may be ranked on the basis of their propensity to promote dissociation or melting (e.g., on the free energy of association or dissociation of a particular pairing, the simplest approach is to examine the pairs on an individual pair basis, though next neighbor or similar analysis can also be used). In terms of promoting dissociation: A:U is preferred over G:C; G:U is preferred over G:C; and I:C is preferred over G:C (I=inosine). Mismatches, e.g., non-canonical or other than canonical pairings (as described elsewhere herein) are preferred over canonical (A:T, A:U, G:C) pairings; and pairings which include a universal base are preferred over canonical pairings.

[0461] In one embodiment, the RNAi agent comprises at least one of the first 1, 2, 3, 4, or 5 base pairs within the duplex regions from the 5′-end of the antisense strand independently selected from the group of: A:U, G:U, I:C, and mismatched pairs, e.g., non-canonical or other than canonical pairings or pairings which include a universal base, to promote the dissociation of the antisense strand at the 5′-end of the duplex.

[0462] In one embodiment, the nucleotide at the 1 position within the duplex region from the 5′-end in the antisense strand is selected from the group consisting of A, dA, dU, U, and dT. Alternatively, at least one of the first 1, 2 or 3 base pair within the duplex region from the 5′-end of the antisense strand is an AU base pair. For example, the first base pair within the duplex region from the 5′-end of the antisense strand is an AU base pair.

[0463] In another embodiment, the nucleotide at the 3′-end of the sense strand is deoxy-thymine (dT). In another embodiment, the nucleotide at the 3′-end of the antisense strand is deoxy-thymine (dT). In one embodiment, there is a short sequence of deoxy-thymine nucleotides, for example, two dT nucleotides on the 3′-end of the sense and/or antisense strand.

[0464] In one embodiment, the sense strand sequence may be represented by formula (I):

(I)

5′ nₚ-Nₐ-(X X X)ᵢ-N_{b}-Y Y Y-N_{b}-(Z Z Z)ⱼ-Nₐ-n_{q} 3′

[0465] wherein:

[0466] i and j are each independently 0 or 1;

[0467] p and q are each independently 0-6;

[0468] each Nₐ independently represents an oligonucleotide sequence comprising 0-25 modified nucleotides, each sequence comprising at least two differently modified nucleotides;

[0469] each N_{b} independently represents an oligonucleotide sequence comprising 0-10 modified nucleotides;

[0470] each nₚ and n_{q} independently represent an overhang nucleotide;

[0471] wherein Nb and Y do not have the same modification; and

[0472] XXX, YYY and ZZZ each independently represent one motif of three identical modifications on three consecutive nucleotides. Preferably YYY is all 2′-F modified nucleotides.

[0473] In one embodiment, the Nₐ and/or N_{b} comprise modifications of alternating pattern.

[0474] In one embodiment, the YYY motif occurs at or near the cleavage site of the sense strand. For example, when the RNAi agent has a duplex region of 17-23 nucleotides in length, the YYY motif can occur at or the vicinity of the cleavage site (e.g.: can occur at positions 6, 7, 8, 7, 8, 9, 8, 9, 10, 9, 10, 11, 10, 11, 12 or 11, 12, 13) of—the sense strand, the count starting from the 1^{st} nucleotide, from the 5′-end; or optionally, the count starting at the 1^{st} paired nucleotide within the duplex region, from the 5′-end.

[0475] In one embodiment, i is 1 and j is 0, or i is 0 and j is 1, or both i and j are 1. The sense strand can therefore be represented by the following formulas:

(Ib)

5′ nₚ-Nₐ-YYY-N_{b}-ZZZ-Nₐ-n_{q} 3′;

(Ic)

5′ nₚ-Nₐ-XXX-N_{b}-YYY-Nₐ-n_{q} 3′;
or

(Id)

5′ nₚ-Nₐ-XXX-N_{b}-YYY-N_{b}-ZZZ-Nₐ-n_{q} 3′.

[0476] When the sense strand is represented by formula (Ib), N_{b} represents an oligonucleotide sequence comprising 0-10, 0-7, 0-5, 0-4, 0-2 or 0 modified nucleotides. Each Nₐ independently can represent an oligonucleotide sequence comprising 2-20, 2-15, or 2-10 modified nucleotides.

[0477] When the sense strand is represented as formula (Ic), N_{b} represents an oligonucleotide sequence comprising 0-10, 0-7, 0-10, 0-7, 0-5, 0-4, 0-2 or 0 modified nucleotides. Each Nₐ can independently represent an oligonucleotide sequence comprising 2-20, 2-15, or 2-10 modified nucleotides.

[0478] When the sense strand is represented as formula (Id), each N_{b} independently represents an oligonucleotide sequence comprising 0-10, 0-7, 0-5, 0-4, 0-2 or 0 modified nucleotides. Preferably, N_{b} is 0, 1, 2, 3, 4, 5 or 6 Each Nₐ can independently represent an oligonucleotide sequence comprising 2-20, 2-15, or 2-10 modified nucleotides.

[0479] Each of X, Y and Z may be the same or different from each other.

[0480] In other embodiments, i is 0 and j is 0, and the sense strand may be represented by the formula:

(Ia)

5′ nₚ-Nₐ-YYY-Nₐ-n_{q} 3′.

[0481] When the sense strand is represented by formula (Ia), each Nₐ independently can represent an oligonucleotide sequence comprising 2-20, 2-15, or 2-10 modified nucleotides.

[0482] In one embodiment, the antisense strand sequence of the RNAi may be represented by formula (II):

(II)

5′ n_{q′}-Nₐ′-(Z′Z′Z′)ₖ-N_{b}′-Y′Y′Y′-N_{b}′-
(X′X′X′)ₗ-N′ₐ-nₚ′ 3′

[0483] wherein:

[0484] k and 1 are each independently 0 or 1;

[0485] p′ and q′ are each independently 0-6;

[0486] each Nₐ′ independently represents an oligonucleotide sequence comprising 0-25 modified nucleotides, each sequence comprising at least two differently modified nucleotides;

[0487] each N_{b}′ independently represents an oligonucleotide sequence comprising 0-10 modified nucleotides;

[0488] each nₚ′ and n_{q}′ independently represent an overhang nucleotide;

[0489] wherein N_{b}′ and Y′ do not have the same modification;

[0490] and

[0491] X′X′X′, Y′Y′Y′ and Z′Z′Z′ each independently represent one motif of three identical modifications on three consecutive nucleotides.

[0492] In one embodiment, the Nₐ′ and/or N_{b}′ comprise modifications of alternating pattern.

[0493] The Y′Y′Y′ motif occurs at or near the cleavage site of the antisense strand. For example, when the RNAi agent has a duplex region of 17-23 nucleotide in length, the Y′Y′Y′ motif can occur at positions 9, 10, 11; 10, 11, 12; 11, 12, 13; 12, 13, 14; or 13, 14, 15 of the antisense strand, with the count starting from the 1^{st} nucleotide, from the 5′-end; or optionally, the count starting at the 1^{st} paired nucleotide within the duplex region, from the 5′-end. Preferably, the Y′Y′Y′ motif occurs at positions 11, 12, 13.

[0494] In one embodiment, Y′Y′Y′ motif is all 2′-OMe modified nucleotides.

[0495] In one embodiment, k is 1 and 1 is 0, or k is 0 and 1 is 1, or both k and 1 are 1.

[0496] The antisense strand can therefore be represented by the following formulas:

(IIb)

5′ n_{q′}-Nₐ′-Z′Z′Z′-N_{b}′-Y′Y′Y′-Nₐ′-n_{p′} 3′;

(IIc)

5′ n_{q′}-Nₐ′-Y′Y′Y′-N_{b}′-X′X′X′-n_{p′} 3′;
or

(IId)

5′ n_{q′}-Nₐ′-Z′Z′Z′-N_{b}′-Y′Y′Y′-N_{b}′-X′X′X′-
Nₐ′-n_{p′} 3′.

[0497] When the antisense strand is represented by formula (IIb), N_{b}′ represents an oligonucleotide sequence comprising 0-10, 0-7, 0-10, 0-7, 0-5, 0-4, 0-2 or 0 modified nucleotides. Each Nₐ′ independently represents an oligonucleotide sequence comprising 2-20, 2-15, or 2-10 modified nucleotides.

[0498] When the antisense strand is represented as formula (Hc), N_{b}′ represents an oligonucleotide sequence comprising 0-10, 0-7, 0-10, 0-7, 0-5, 0-4, 0-2 or 0 modified nucleotides. Each Nₐ′ independently represents an oligonucleotide sequence comprising 2-20, 2-15, or 2-10 modified nucleotides.

[0499] When the antisense strand is represented as formula (IId), each N_{b}′ independently represents an oligonucleotide sequence comprising 0-10, 0-7, 0-10, 0-7, 0-5, 0-4, 0-2 or 0 modified nucleotides. Each Nₐ′ independently represents an oligonucleotide sequence comprising 2-20, 2-15, or 2-10 modified nucleotides. Preferably, N_{b} is 0, 1, 2, 3, 4, 5 or 6.

[0500] In other embodiments, k is 0 and 1 is 0 and the antisense strand may be represented by the formula:

(Ia)

5′ n_{p′}-N_{a′}-Y′Y′Y′-N_{a′}-n_{q′} 3′.

[0501] When the antisense strand is represented as formula (IIa), each Nₐ′ independently represents an oligonucleotide sequence comprising 2-20, 2-15, or 2-10 modified nucleotides.

[0502] Each of X′, Y′ and Z′ may be the same or different from each other.

[0503] Each nucleotide of the sense strand and antisense strand may be independently modified with LNA, HNA, CeNA, 2′-methoxyethyl, 2′-O-methyl, 2′-O-allyl, 2′-C-allyl, 2′-hydroxyl, or 2′-fluoro. For example, each nucleotide of the sense strand and antisense strand is independently modified with 2′-O-methyl or 2′-fluoro. Each X, Y, Z, X′, Y′ and Z′, in particular, may represent a 2′-O-methyl modification or a 2′-fluoro modification.

[0504] In one embodiment, the sense strand of the RNAi agent may contain YYY motif occurring at 9, 10 and 11 positions of the strand when the duplex region is 21 nt, the count starting from the 1^{st} nucleotide from the 5′-end, or optionally, the count starting at the 1^{st} paired nucleotide within the duplex region, from the 5′-end; and Y represents 2′-F modification. The sense strand may additionally contain XXX motif or ZZZ motifs as wing modifications at the opposite end of the duplex region; and XXX and ZZZ each independently represents a 2′-OMe modification or 2′-F modification.

[0505] In one embodiment the antisense strand may contain Y′Y′Y′ motif occurring at positions 11, 12, 13 of the strand, the count starting from the 1^{st} nucleotide from the 5′-end, or optionally, the count starting at the 1^{st} paired nucleotide within the duplex region, from the 5′-end; and Y′ represents 2′-O-methyl modification. The antisense strand may additionally contain X′X′X′ motif or Z′Z′Z′ motifs as wing modifications at the opposite end of the duplex region; and X′X′X′ and Z′Z′Z′ each independently represents a 2′-OMe modification or 2′-F modification.

[0506] The sense strand represented by any one of the above formulas (Ia), (Ib), (Ic), and (Id) forms a duplex with a antisense strand being represented by any one of formulas (IIa), (IIb), (IIc), and (IId), respectively.

[0507] Accordingly, the RNAi agents for use in the methods of the invention may comprise a sense strand and an antisense strand, each strand having 14 to 30 nucleotides, the RNAi duplex represented by formula (III):

(III)

sense:
5′ nₚ-Nₐ-(X X X)ᵢ-N_{b}-Y Y Y-N_{b}-(Z Z Z)ⱼ-Nₐ-n_{q} 3′
antisense:
3′ nₚ′-Nₐ′-(X′X′X′)ₖ-N_{b}′-Y′Y′Y′-N_{b}′-(Z′Z′Z′)ₗ-Nₐ′-
n_{q}′ 5′

[0508] wherein:

[0509] i, j, k, and 1 are each independently 0 or 1;

[0510] p, p′, q, and q′ are each independently 0-6;

[0511] each Nₐ and Nₐ′ independently represents an oligonucleotide sequence comprising 0-25 modified nucleotides, each sequence comprising at least two differently modified nucleotides;

[0512] each N_{b} and N_{b}′ independently represents an oligonucleotide sequence comprising 0-10 modified nucleotides;

[0513] wherein

[0514] each nₚ′, nₚ, n_{q}′, and n_{q}, each of which may or may not be present, independently represents an overhang nucleotide; and

[0515] XXX, YYY, ZZZ, X′X′X′, Y′Y′Y′, and Z′Z′Z′ each independently represent one motif of three identical modifications on three consecutive nucleotides.

[0516] In one embodiment, i is 0 and j is 0; or i is 1 and j is 0; or i is 0 and j is 1; or both i and j are 0; or both i and j are 1. In another embodiment, k is 0 and 1 is 0; or k is 1 and 1 is 0; k is 0 and 1 is 1; or both k and 1 are 0; or both k and 1 are 1.

[0517] Exemplary combinations of the sense strand and antisense strand forming a RNAi duplex include the formulas below:

(IIIa)

5′ nₚ-Nₐ-Y Y Y-Nₐ-n_{q} 3′
3′ nₚ′-Nₐ′-Y′Y′Y′-Nₐ′n_{q}′ 5′

(IIIb)

5′ nₚ-Nₐ-Y Y Y-N_{b}-Z Z Z-Nₐ-n_{q} 3′
3′ nₚ′-Nₐ′-Y′Y′Y′-N_{b}′-Z′Z′Z′-Nₐ′n_{q}′ 5′

(IIIc)

5′ nₚ-Nₐ-X X X-N_{b}-Y Y Y-Nₐ-n_{q} 3′
3′ nₚ′-Nₐ′-X′X′X′-N_{b}′-Y′Y′Y′-Nₐ′-n_{q}′ 5′

(IIId)

5′ nₚ-Nₐ-X X X-N_{b}-Y Y Y-N_{b}-Z Z Z-Nₐ-n_{q} 3′
3′ nₚ′-Nₐ′-X′X′X′-N_{b}′-Y′Y′Y′-N_{b}′-Z′Z′Z′-Nₐ-n_{q}′ 5′

[0518] When the RNAi agent is represented by formula (IIIa), each Nₐ independently represents an oligonucleotide sequence comprising 2-20, 2-15, or 2-10 modified nucleotides.

[0519] When the RNAi agent is represented by formula (IIIb), each N_{b} independently represents an oligonucleotide sequence comprising 1-10, 1-7, 1-5 or 1-4 modified nucleotides. Each Nₐ independently represents an oligonucleotide sequence comprising 2-20, 2-15, or 2-10 modified nucleotides.

[0520] When the RNAi agent is represented as formula (IIIc), each N_{b}, N_{b}′ independently represents an oligonucleotide sequence comprising 0-10, 0-7, 0-10, 0-7, 0-5, 0-4, 0-2 or 0 modified nucleotides. Each Nₐ independently represents an oligonucleotide sequence comprising 2-20, 2-15, or 2-10 modified nucleotides.

[0521] When the RNAi agent is represented as formula (IIId), each N_{b}, N_{b}′ independently represents an oligonucleotide sequence comprising 0-10, 0-7, 0-10, 0-7, 0-5, 0-4, 0-2 or 0 modified nucleotides. Each Nₐ, Nₐ′ independently represents an oligonucleotide sequence comprising 2-20, 2-15, or 2-10 modified nucleotides. Each of Nₐ, Nₐ′, N_{b} and N_{b}′ independently comprises modifications of alternating pattern.

[0522] Each of X, Y and Z in formulas (III), (IIIa), (IIIb), (IIIc), and (IIId) may be the same or different from each other.

[0523] When the RNAi agent is represented by formula (III), (IIIa), (IIIb), (IIIc), and (IIId), at least one of the Y nucleotides may form a base pair with one of the Y′ nucleotides. Alternatively, at least two of the Y nucleotides form base pairs with the corresponding Y′ nucleotides; or all three of the Y nucleotides all form base pairs with the corresponding Y′ nucleotides.

[0524] When the RNAi agent is represented by formula (IIIb) or (IIId), at least one of the Z nucleotides may form a base pair with one of the Z′ nucleotides. Alternatively, at least two of the Z nucleotides form base pairs with the corresponding Z′ nucleotides; or all three of the Z nucleotides all form base pairs with the corresponding Z′ nucleotides.

[0525] When the RNAi agent is represented as formula (IIIc) or (IIId), at least one of the X nucleotides may form a base pair with one of the X′ nucleotides. Alternatively, at least two of the X nucleotides form base pairs with the corresponding X′ nucleotides; or all three of the X nucleotides all form base pairs with the corresponding X′ nucleotides.

[0526] In one embodiment, the modification on the Y nucleotide is different than the modification on the Y′ nucleotide, the modification on the Z nucleotide is different than the modification on the Z′ nucleotide, and/or the modification on the X nucleotide is different than the modification on the X′ nucleotide.

[0527] In one embodiment, when the RNAi agent is represented by formula (IIId), the Nₐ modifications are 2′-O-methyl or 2′-fluoro modifications. In another embodiment, when the RNAi agent is represented by formula (IIId), the Nₐ modifications are 2′-O-methyl or 2′-fluoro modifications and nₚ′>0 and at least one nₚ′ is linked to a neighboring nucleotide a via phosphorothioate linkage. In yet another embodiment, when the RNAi agent is represented by formula (IIId), the Nₐ modifications are 2′-O-methyl or 2′-fluoro modifications, nₚ′>0 and at least one nₚ′ is linked to a neighboring nucleotide via phosphorothioate linkage, and the sense strand is conjugated to one or more GalNAc derivatives attached through a bivalent or trivalent branched linker (described below). In another embodiment, when the RNAi agent is represented by formula (IIId), the Nₐ modifications are 2′-O-methyl or 2′-fluoro modifications, nₚ′>0 and at least one nₚ′ is linked to a neighboring nucleotide via phosphorothioate linkage, the sense strand comprises at least one phosphorothioate linkage, and the sense strand is conjugated to one or more GalNAc derivatives attached through a bivalent or trivalent branched linker.

[0528] In one embodiment, when the RNAi agent is represented by formula (IIIa), the Nₐ modifications are 2′-O-methyl or 2′-fluoro modifications, nₚ′>0 and at least one nₚ′ is linked to a neighboring nucleotide via phosphorothioate linkage, the sense strand comprises at least one phosphorothioate linkage, and the sense strand is conjugated to one or more GalNAc derivatives attached through a bivalent or trivalent branched linker.

[0529] In one embodiment, the RNAi agent is a multimer containing at least two duplexes represented by formula (III), (IIIa), (IIIb), (IIIc), and (IIId), wherein the duplexes are connected by a linker. The linker can be cleavable or non-cleavable. Optionally, the multimer further comprises a ligand. Each of the duplexes can target the same gene or two different genes; or each of the duplexes can target same gene at two different target sites.

[0530] In one embodiment, the RNAi agent is a multimer containing three, four, five, six or more duplexes represented by formula (III), (IIIa), (IIIb), (IIIc), and (IIId), wherein the duplexes are connected by a linker. The linker can be cleavable or non-cleavable. Optionally, the multimer further comprises a ligand. Each of the duplexes can target the same gene or two different genes; or each of the duplexes can target same gene at two different target sites.

[0531] In one embodiment, two RNAi agents represented by formula (III), (IIIa), (IIIb), (IIIc), and (IIId) are linked to each other at the 5′ end, and one or both of the 3′ ends and are optionally conjugated to a ligand. Each of the agents can target the same gene or two different genes; or each of the agents can target same gene at two different target sites.

[0532] Various publications describe multimeric RNAi agents that can be used in the methods of the invention. Such publications include WO2007/091269, U.S. Pat. No. 7,858,769, WO2010/141511, WO2007/117686, WO2009/014887 and WO2011/031520 the entire contents of each of which are hereby incorporated herein by reference.

[0533] As described in more detail below, the RNAi agent that contains conjugations of one or more carbohydrate moieties to a RNAi agent can optimize one or more properties of the RNAi agent. In many cases, the carbohydrate moiety will be attached to a modified subunit of the RNAi agent. For example, the ribose sugar of one or more ribonucleotide subunits of a dsRNA agent can be replaced with another moiety, e.g., a non-carbohydrate (preferably cyclic) carrier to which is attached a carbohydrate ligand. A ribonucleotide subunit in which the ribose sugar of the subunit has been so replaced is referred to herein as a ribose replacement modification subunit (RRMS). A cyclic carrier may be a carbocyclic ring system, i.e., all ring atoms are carbon atoms, or a heterocyclic ring system, i.e., one or more ring atoms may be a heteroatom, e.g., nitrogen, oxygen, sulfur. The cyclic carrier may be a monocyclic ring system, or may contain two or more rings, e.g. fused rings. The cyclic carrier may be a fully saturated ring system, or it may contain one or more double bonds.

[0534] The ligand may be attached to the polynucleotide via a carrier. The carriers include (i) at least one “backbone attachment point,” preferably two “backbone attachment points” and (ii) at least one “tethering attachment point.” A “backbone attachment point” as used herein refers to a functional group, e.g. a hydroxyl group, or generally, a bond available for, and that is suitable for incorporation of the carrier into the backbone, e.g., the phosphate, or modified phosphate, e.g., sulfur containing, backbone, of a ribonucleic acid. A “tethering attachment point” (TAP) in some embodiments refers to a constituent ring atom of the cyclic carrier, e.g., a carbon atom or a heteroatom (distinct from an atom which provides a backbone attachment point), that connects a selected moiety. The moiety can be, e.g., a carbohydrate, e.g. monosaccharide, disaccharide, trisaccharide, tetrasaccharide, oligosaccharide and polysaccharide. Optionally, the selected moiety is connected by an intervening tether to the cyclic carrier. Thus, the cyclic carrier will often include a functional group, e.g., an amino group, or generally, provide a bond, that is suitable for incorporation or tethering of another chemical entity, e.g., a ligand to the constituent ring.

[0535] The RNAi agents may be conjugated to a ligand via a carrier, wherein the carrier can be cyclic group or acyclic group; preferably, the cyclic group is selected from pyrrolidinyl, pyrazolinyl, pyrazolidinyl, imidazolinyl, imidazolidinyl, piperidinyl, piperazinyl, [1,3]dioxolane, oxazolidinyl, isoxazolidinyl, morpholinyl, thiazolidinyl, isothiazolidinyl, quinoxalinyl, pyridazinonyl, tetrahydrofuryl and decalin; preferably, the acyclic group is selected from serinol backbone or diethanolamine backbone.

[0536] In certain specific embodiments, the RNAi agent for use in the methods of the invention is an agent selected from the group of agents listed in any one of Tables 3, 4, 5, 6, 18, 19, 20, 21, and 23. These agents may further comprise a ligand.

### IV. iRNAs Conjugated to Ligands

[0537] Another modification of the RNA of an iRNA of the invention involves chemically linking to the RNA one or more ligands, moieties or conjugates that enhance the activity, cellular distribution or cellular uptake of the iRNA. Such moieties include but are not limited to lipid moieties such as a cholesterol moiety (Letsinger et al., Proc. Natl. Acid. Sci. USA, 1989, 86: 6553-6556), cholic acid (Manoharan et al., Biorg. Med. Chem. Let., 1994, 4:1053-1060), a thioether, e.g., beryl-S-tritylthiol (Manoharan et al., Ann. N.Y. Acad. Sci., 1992, 660:306-309; Manoharan et al., Biorg. Med. Chem. Let., 1993, 3:2765-2770), a thiocholesterol (Oberhauser et al., Nucl. Acids Res., 1992, 20:533-538), an aliphatic chain, e.g., dodecandiol or undecyl residues (Saison-Behmoaras et al., EMBO J, 1991, 10:1111-1118; Kabanov et al., FEBS Lett., 1990, 259:327-330; Svinarchuk et al., Biochimie, 1993, 75:49-54), a phospholipid, e.g., di-hexadecyl-rac-glycerol or triethyl-ammonium 1,2-di-O-hexadecyl-rac-glycero-3-phosphonate (Manoharan et al., Tetrahedron Lett., 1995, 36:3651-3654; Shea et al., Nucl. Acids Res., 1990, 18:3777-3783), a polyamine or a polyethylene glycol chain (Manoharan et al., Nucleosides & Nucleotides, 1995, 14:969-973), or adamantane acetic acid (Manoharan et al., Tetrahedron Lett., 1995, 36:3651-3654), a palmityl moiety (Mishra et al., Biochim. Biophys. Acta, 1995, 1264:229-237), or an octadecylamine or hexylamino-carbonyloxycholesterol moiety (Crooke et al., J. Pharmacol. Exp. Ther., 1996, 277:923-937).

[0538] In one embodiment, a ligand alters the distribution, targeting or lifetime of an iRNA agent into which it is incorporated. In preferred embodiments a ligand provides an enhanced affinity for a selected target, e.g., molecule, cell or cell type, compartment, e.g., a cellular or organ compartment, tissue, organ or region of the body, as, e.g., compared to a species absent such a ligand. Preferred ligands will not take part in duplex pairing in a duplexed nucleic acid.

[0539] Ligands can include a naturally occurring substance, such as a protein (e.g., human serum albumin (HSA), low-density lipoprotein (LDL), or globulin); carbohydrate (e.g., a dextran, pullulan, chitin, chitosan, inulin, cyclodextrin, N-acetylgalactosamine, or hyaluronic acid); or a lipid. The ligand can also be a recombinant or synthetic molecule, such as a synthetic polymer, e.g., a synthetic polyamino acid. Examples of polyamino acids include polyamino acid is a polylysine (PLL), poly L-aspartic acid, poly L-glutamic acid, styrene-maleic acid anhydride copolymer, poly(L-lactide-co-glycolied) copolymer, divinyl ether-maleic anhydride copolymer, N-(2-hydroxypropyl)methacrylamide copolymer (HMPA), polyethylene glycol (PEG), polyvinyl alcohol (PVA), polyurethane, poly(2-ethylacryllic acid), N-isopropylacrylamide polymers, or polyphosphazine. Example of polyamines include: polyethylenimine, polylysine (PLL), spermine, spermidine, polyamine, pseudopeptide-polyamine, peptidomimetic polyamine, dendrimer polyamine, arginine, amidine, protamine, cationic lipid, cationic porphyrin, quaternary salt of a polyamine, or an alpha helical peptide.

[0540] Ligands can also include targeting groups, e.g., a cell or tissue targeting agent, e.g., a lectin, glycoprotein, lipid or protein, e.g., an antibody, that binds to a specified cell type such as a kidney cell. A targeting group can be a thyrotropin, melanotropin, lectin, glycoprotein, surfactant protein A, Mucin carbohydrate, multivalent lactose, multivalent galactose, N-acetyl-galactosamine, N-acetyl-gulucoseamine multivalent mannose, multivalent fucose, glycosylated polyaminoacids, multivalent galactose, transferrin, bisphosphonate, polyglutamate, polyaspartate, a lipid, cholesterol, a steroid, bile acid, folate, vitamin B12, vitamin A, biotin, or an RGD peptide or RGD peptide mimetic.

[0541] Other examples of ligands include dyes, intercalating agents (e.g. acridines), cross-linkers (e.g. psoralen, mitomycin C), porphyrins (TPPC4, texaphyrin, Sapphyrin), polycyclic aromatic hydrocarbons (e.g., phenazine, dihydrophenazine), artificial endonucleases (e.g. EDTA), lipophilic molecules, e.g., cholesterol, cholic acid, adamantane acetic acid, 1-pyrene butyric acid, dihydrotestosterone, 1,3-Bis-O(hexadecyl)glycerol, geranyloxyhexyl group, hexadecylglycerol, borneol, menthol, 1,3-propanediol, heptadecyl group, palmitic acid, myristic acid,O3-(oleoyl)lithocholic acid, O3-(oleoyl)cholenic acid, dimethoxytrityl, or phenoxazine) and peptide conjugates (e.g., antennapedia peptide, Tat peptide), alkylating agents, phosphate, amino, mercapto, PEG (e.g., PEG-40K), MPEG, [MPEG]₂, polyamino, alkyl, substituted alkyl, radiolabeled markers, enzymes, haptens (e.g. biotin), transport/absorption facilitators (e.g., aspirin, vitamin E, folic acid), synthetic ribonucleases (e.g., imidazole, bisimidazole, histamine, imidazole clusters, acridine-imidazole conjugates, Eu3+ complexes of tetraazamacrocycles), dinitrophenyl, HRP, or AP.

[0542] Ligands can be proteins, e.g., glycoproteins, or peptides, e.g., molecules having a specific affinity for a co-ligand, or antibodies e.g., an antibody, that binds to a specified cell type such as a hepatic cell. Ligands can also include hormones and hormone receptors. They can also include non-peptidic species, such as lipids, lectins, carbohydrates, vitamins, cofactors, multivalent lactose, multivalent galactose, N-acetyl-galactosamine, N-acetyl-glucosamine multivalent mannose, or multivalent fucose. The ligand can be, for example, a lipopolysaccharide, an activator of p38 MAP kinase, or an activator of NF-κB.

[0543] The ligand can be a substance, e.g., a drug, which can increase the uptake of the iRNA agent into the cell, for example, by disrupting the cell's cytoskeleton, e.g., by disrupting the cell's microtubules, microfilaments, and/or intermediate filaments. The drug can be, for example, taxon, vincristine, vinblastine, cytochalasin, nocodazole, japlakinolide, latrunculin A, phalloidin, swinholide A, indanocine, or myoservin.

[0544] In some embodiments, a ligand attached to an iRNA as described herein acts as a pharmacokinetic modulator (PK modulator). PK modulators include lipophiles, bile acids, steroids, phospholipid analogues, peptides, protein binding agents, PEG, vitamins etc. Exemplary PK modulators include, but are not limited to, cholesterol, fatty acids, cholic acid, lithocholic acid, dialkylglycerides, diacylglyceride, phospholipids, sphingolipids, naproxen, ibuprofen, vitamin E, biotin etc. Oligonucleotides that comprise a number of phosphorothioate linkages are also known to bind to serum protein, thus short oligonucleotides, e.g., oligonucleotides of about 5 bases, 10 bases, 15 bases or 20 bases, comprising multiple of phosphorothioate linkages in the backbone are also amenable to the present invention as ligands (e.g. as PK modulating ligands). In addition, aptamers that bind serum components (e.g. serum proteins) are also suitable for use as PK modulating ligands in the embodiments described herein.

[0545] Ligand-conjugated oligonucleotides of the invention may be synthesized by the use of an oligonucleotide that bears a pendant reactive functionality, such as that derived from the attachment of a linking molecule onto the oligonucleotide (described below). This reactive oligonucleotide may be reacted directly with commercially-available ligands, ligands that are synthesized bearing any of a variety of protecting groups, or ligands that have a linking moiety attached thereto.

[0546] The oligonucleotides used in the conjugates of the present invention may be conveniently and routinely made through the well-known technique of solid-phase synthesis. Equipment for such synthesis is sold by several vendors including, for example, Applied Biosystems (Foster City, Calif.). Any other means for such synthesis known in the art may additionally or alternatively be employed. It is also known to use similar techniques to prepare other oligonucleotides, such as the phosphorothioates and alkylated derivatives.

[0547] In the ligand-conjugated oligonucleotides and ligand-molecule bearing sequence-specific linked nucleosides of the present invention, the oligonucleotides and oligonucleosides may be assembled on a suitable DNA synthesizer utilizing standard nucleotide or nucleoside precursors, or nucleotide or nucleoside conjugate precursors that already bear the linking moiety, ligand-nucleotide or nucleoside-conjugate precursors that already bear the ligand molecule, or non-nucleoside ligand-bearing building blocks.

[0548] When using nucleotide-conjugate precursors that already bear a linking moiety, the synthesis of the sequence-specific linked nucleosides is typically completed, and the ligand molecule is then reacted with the linking moiety to form the ligand-conjugated oligonucleotide. In some embodiments, the oligonucleotides or linked nucleosides of the present invention are synthesized by an automated synthesizer using phosphoramidites derived from ligand-nucleoside conjugates in addition to the standard phosphoramidites and non-standard phosphoramidites that are commercially available and routinely used in oligonucleotide synthesis.

[0549] A. Lipid Conjugates

[0550] In one embodiment, the ligand or conjugate is a lipid or lipid-based molecule. Such a lipid or lipid-based molecule preferably binds a serum protein, e.g., human serum albumin (HSA). An HSA binding ligand allows for distribution of the conjugate to a target tissue, e.g., a non-kidney target tissue of the body. For example, the target tissue can be the liver, including parenchymal cells of the liver. Other molecules that can bind HSA can also be used as ligands. For example, naproxen or aspirin can be used. A lipid or lipid-based ligand can (a) increase resistance to degradation of the conjugate, (b) increase targeting or transport into a target cell or cell membrane, and/or (c) can be used to adjust binding to a serum protein, e.g., HSA.

[0551] A lipid based ligand can be used to inhibit, e.g., control the binding of the conjugate to a target tissue. For example, a lipid or lipid-based ligand that binds to HSA more strongly will be less likely to be targeted to the kidney and therefore less likely to be cleared from the body. A lipid or lipid-based ligand that binds to HSA less strongly can be used to target the conjugate to the kidney.

[0552] In a preferred embodiment, the lipid based ligand binds HSA. Preferably, it binds HSA with a sufficient affinity such that the conjugate will be preferably distributed to a non-kidney tissue. However, it is preferred that the affinity not be so strong that the HSA-ligand binding cannot be reversed.

[0553] In another preferred embodiment, the lipid based ligand binds HSA weakly or not at all, such that the conjugate will be preferably distributed to the kidney. Other moieties that target to kidney cells can also be used in place of or in addition to the lipid based ligand.

[0554] In another aspect, the ligand is a moiety, e.g., a vitamin, which is taken up by a target cell, e.g., a proliferating cell. These are particularly useful for treating disorders characterized by unwanted cell proliferation, e.g., of the malignant or non-malignant type, e.g., cancer cells. Exemplary vitamins include vitamin A, E, and K. Other exemplary vitamins include are B vitamin, e.g., folic acid, B12, riboflavin, biotin, pyridoxal or other vitamins or nutrients taken up by target cells such as liver cells. Also included are HSA and low density lipoprotein (LDL).

[0555] B. Cell Permeation Agents

[0556] In another aspect, the ligand is a cell-permeation agent, preferably a helical cell-permeation agent. Preferably, the agent is amphipathic. An exemplary agent is a peptide such as tat or antennopedia. If the agent is a peptide, it can be modified, including a peptidylmimetic, invertomers, non-peptide or pseudo-peptide linkages, and use of D-amino acids. The helical agent is preferably an alpha-helical agent, which preferably has a lipophilic and a lipophobic phase.

[0557] The ligand can be a peptide or peptidomimetic. A peptidomimetic (also referred to herein as an oligopeptidomimetic) is a molecule capable of folding into a defined three-dimensional structure similar to a natural peptide. The attachment of peptide and peptidomimetics to iRNA agents can affect pharmacokinetic distribution of the iRNA, such as by enhancing cellular recognition and absorption. The peptide or peptidomimetic moiety can be about 5-50 amino acids long, e.g., about 5, 10, 15, 20, 25, 30, 35, 40, 45, or 50 amino acids long.

[0558] A peptide or peptidomimetic can be, for example, a cell permeation peptide, cationic peptide, amphipathic peptide, or hydrophobic peptide (e.g., consisting primarily of Tyr, Trp or

[0559] Phe). The peptide moiety can be a dendrimer peptide, constrained peptide or crosslinked peptide. In another alternative, the peptide moiety can include a hydrophobic membrane translocation sequence (MTS). An exemplary hydrophobic MTS-containing peptide is RFGF having the amino acid sequence AAVALLPAVLLALLAP (SEQ ID NO: 9). An RFGF analogue (e.g., amino acid sequence AALLPVLLAAP (SEQ ID NO: 10) containing a hydrophobic MTS can also be a targeting moiety. The peptide moiety can be a “delivery” peptide, which can carry large polar molecules including peptides, oligonucleotides, and protein across cell membranes. For example, sequences from the HIV Tat protein (GRKKRRQRRRPPQ (SEQ ID NO: 11) and the Drosophila Antennapedia protein (RQIKIWFQNRRMKWKK (SEQ ID NO: 12) have been found to be capable of functioning as delivery peptides. A peptide or peptidomimetic can be encoded by a random sequence of DNA, such as a peptide identified from a phage-display library, or one-bead-one-compound (OBOC) combinatorial library (Lam et al., Nature, 354:82-84, 1991). Examples of a peptide or peptidomimetic tethered to a dsRNA agent via an incorporated monomer unit for cell targeting purposes is an arginine-glycine-aspartic acid (RGD)-peptide, or RGD mimic. A peptide moiety can range in length from about 5 amino acids to about 40 amino acids. The peptide moieties can have a structural modification, such as to increase stability or direct conformational properties. Any of the structural modifications described below can be utilized.

[0560] An RGD peptide for use in the compositions and methods of the invention may be linear or cyclic, and may be modified, e.g., glycosylated or methylated, to facilitate targeting to a specific tissue(s). RGD-containing peptides and peptidiomimemtics may include D-amino acids, as well as synthetic RGD mimics. In addition to RGD, one can use other moieties that target the integrin ligand. Preferred conjugates of this ligand target PECAM-1 or VEGF.

[0561] A “cell permeation peptide” is capable of permeating a cell, e.g., a microbial cell, such as a bacterial or fungal cell, or a mammalian cell, such as a human cell. A microbial cell-permeating peptide can be, for example, a α-helical linear peptide (e.g., LL-37 or Ceropin P1), a disulfide bond-containing peptide (e.g., α-defensin, β-defensin or bactenecin), or a peptide containing only one or two dominating amino acids (e.g., PR-39 or indolicidin). A cell permeation peptide can also include a nuclear localization signal (NLS). For example, a cell permeation peptide can be a bipartite amphipathic peptide, such as MPG, which is derived from the fusion peptide domain of HIV-1 gp41 and the NLS of SV40 large T antigen (Simeoni et al., Nucl. Acids Res. 31:2717-2724, 2003).

[0562] C. Carbohydrate Conjugates

[0563] In some embodiments of the compositions and methods of the invention, an iRNA oligonucleotide further comprises a carbohydrate. The carbohydrate conjugated iRNA are advantageous for the in vivo delivery of nucleic acids, as well as compositions suitable for in vivo therapeutic use, as described herein. As used herein, “carbohydrate” refers to a compound which is either a carbohydrate per se made up of one or more monosaccharide units having at least 6 carbon atoms (which can be linear, branched or cyclic) with an oxygen, nitrogen or sulfur atom bonded to each carbon atom; or a compound having as a part thereof a carbohydrate moiety made up of one or more monosaccharide units each having at least six carbon atoms (which can be linear, branched or cyclic), with an oxygen, nitrogen or sulfur atom bonded to each carbon atom. Representative carbohydrates include the sugars (mono-, di-, tri- and oligosaccharides containing from about 4, 5, 6, 7, 8, or 9 monosaccharide units), and polysaccharides such as starches, glycogen, cellulose and polysaccharide gums. Specific monosaccharides include C5 and above (e.g., C5, C6, C7, or C8) sugars; di- and trisaccharides include sugars having two or three monosaccharide units (e.g., C5, C6, C7, or C8).

[0564] In one embodiment, a carbohydrate conjugate for use in the compositions and methods of the invention is a monosaccharide. In one embodiment, the monosaccharide is an N-acetylgalactosamine, such as

[chemical structure]

[0565] In another embodiment, a carbohydrate conjugate for use in the compositions and methods of the invention is selected from the group consisting of:

[chemical structure]

[chemical structure]

[chemical structure]

[chemical structure]

[0566] Another representative carbohydrate conjugate for use in the embodiments described herein includes, but is not limited to

[chemical structure]

when one of X or Y is an oligonucleotide, the other is a hydrogen.

[0567] In some embodiments, the carbohydrate conjugate further comprises one or more additional ligands as described above, such as, but not limited to, a PK modulator and/or a cell permeation peptide.

[0568] D. Linkers

[0569] In some embodiments, the conjugate or ligand described herein can be attached to an iRNA oligonucleotide with various linkers that can be cleavable or non-cleavable.

[0570] The term “linker” or “linking group” means an organic moiety that connects two parts of a compound, e.g., covalently attaches two parts of a compound. Linkers typically comprise a direct bond or an atom such as oxygen or sulfur, a unit such as NRB, C(O), C(O)NH, SO, SO₂, SO₂NH or a chain of atoms, such as, but not limited to, substituted or unsubstituted alkyl, substituted or unsubstituted alkenyl, substituted or unsubstituted alkynyl, arylalkyl, arylalkenyl, arylalkynyl, heteroarylalkyl, heteroarylalkenyl, heteroarylalkynyl, heterocyclylalkyl, heterocyclylalkenyl, heterocyclylalkynyl, aryl, heteroaryl, heterocyclyl, cycloalkyl, cycloalkenyl, alkylarylalkyl, alkylarylalkenyl, alkylarylalkynyl, alkenylarylalkyl, alkenylarylalkenyl, alkenylarylalkynyl, alkynylarylalkyl, alkynylarylalkenyl, alkynylarylalkynyl, alkylheteroarylalkyl, alkylheteroarylalkenyl, alkylheteroarylalkynyl, alkenylheteroarylalkyl, alkenylheteroarylalkenyl, alkenylheteroarylalkynyl, alkynylheteroarylalkyl, alkynylheteroarylalkenyl, alkynylheteroarylalkynyl, alkylheterocyclylalkyl, alkylheterocyclylalkenyl, alkylhererocyclylalkynyl, alkenylheterocyclylalkyl, alkenylheterocyclylalkenyl, alkenylheterocyclylalkynyl, alkynylheterocyclylalkyl, alkynylheterocyclylalkenyl, alkynylheterocyclylalkynyl, alkylaryl, alkenylaryl, alkynylaryl, alkylheteroaryl, alkenylheteroaryl, alkynylhereroaryl, which one or more methylenes can be interrupted or terminated by O, S, S(O), SO₂, N(8), C(O), substituted or unsubstituted aryl, substituted or unsubstituted heteroaryl, substituted or unsubstituted heterocyclic; where R8 is hydrogen, acyl, aliphatic or substituted aliphatic. In one embodiment, the linker is between about 1-24 atoms, 2-24, 3-24, 4-24, 5-24, 6-24, 6-18, 7-18, 8-18 atoms, 7-17, 8-17, 6-16, 7-16, or 8-16 atoms.

[0571] A cleavable linking group is one which is sufficiently stable outside the cell, but which upon entry into a target cell is cleaved to release the two parts the linker is holding together. In a preferred embodiment, the cleavable linking group is cleaved at least about 10 times, 20, times, 30 times, 40 times, 50 times, 60 times, 70 times, 80 times, 90 times or more, or at least about 100 times faster in a target cell or under a first reference condition (which can, e.g., be selected to mimic or represent intracellular conditions) than in the blood of a subject, or under a second reference condition (which can, e.g., be selected to mimic or represent conditions found in the blood or serum).

[0572] Cleavable linking groups are susceptible to cleavage agents, e.g., pH, redox potential or the presence of degradative molecules. Generally, cleavage agents are more prevalent or found at higher levels or activities inside cells than in serum or blood. Examples of such degradative agents include: redox agents which are selected for particular substrates or which have no substrate specificity, including, e.g., oxidative or reductive enzymes or reductive agents such as mercaptans, present in cells, that can degrade a redox cleavable linking group by reduction; esterases; endosomes or agents that can create an acidic environment, e.g., those that result in a pH of five or lower; enzymes that can hydrolyze or degrade an acid cleavable linking group by acting as a general acid, peptidases (which can be substrate specific), and phosphatases.

[0573] A cleavable linkage group, such as a disulfide bond can be susceptible to pH. The pH of human serum is 7.4, while the average intracellular pH is slightly lower, ranging from about 7.1-7.3. Endosomes have a more acidic pH, in the range of 5.5-6.0, and lysosomes have an even more acidic pH at around 5.0. Some linkers will have a cleavable linking group that is cleaved at a preferred pH, thereby releasing a cationic lipid from the ligand inside the cell, or into the desired compartment of the cell.

[0574] A linker can include a cleavable linking group that is cleavable by a particular enzyme. The type of cleavable linking group incorporated into a linker can depend on the cell to be targeted. For example, a liver-targeting ligand can be linked to a cationic lipid through a linker that includes an ester group. Liver cells are rich in esterases, and therefore the linker will be cleaved more efficiently in liver cells than in cell types that are not esterase-rich. Other cell-types rich in esterases include cells of the lung, renal cortex, and testis.

[0575] Linkers that contain peptide bonds can be used when targeting cell types rich in peptidases, such as liver cells and synoviocytes.

[0576] In general, the suitability of a candidate cleavable linking group can be evaluated by testing the ability of a degradative agent (or condition) to cleave the candidate linking group. It will also be desirable to also test the candidate cleavable linking group for the ability to resist cleavage in the blood or when in contact with other non-target tissue. Thus, one can determine the relative susceptibility to cleavage between a first and a second condition, where the first is selected to be indicative of cleavage in a target cell and the second is selected to be indicative of cleavage in other tissues or biological fluids, e.g., blood or serum. The evaluations can be carried out in cell free systems, in cells, in cell culture, in organ or tissue culture, or in whole animals. It can be useful to make initial evaluations in cell-free or culture conditions and to confirm by further evaluations in whole animals. In preferred embodiments, useful candidate compounds are cleaved at least about 2, 4, 10, 20, 30, 40, 50, 60, 70, 80, 90, or about 100 times faster in the cell (or under in vitro conditions selected to mimic intracellular conditions) as compared to blood or serum (or under in vitro conditions selected to mimic extracellular conditions).

[0577] i. Redox Cleavable Linking Groups

[0578] In one embodiment, a cleavable linking group is a redox cleavable linking group that is cleaved upon reduction or oxidation. An example of reductively cleavable linking group is a disulphide linking group (—S—S—). To determine if a candidate cleavable linking group is a suitable “reductively cleavable linking group,” or for example is suitable for use with a particular iRNA moiety and particular targeting agent one can look to methods described herein. For example, a candidate can be evaluated by incubation with dithiothreitol (DTT), or other reducing agent using reagents know in the art, which mimic the rate of cleavage which would be observed in a cell, e.g., a target cell. The candidates can also be evaluated under conditions which are selected to mimic blood or serum conditions. In one, candidate compounds are cleaved by at most about 10% in the blood. In other embodiments, useful candidate compounds are degraded at least about 2, 4, 10, 20, 30, 40, 50, 60, 70, 80, 90, or about 100 times faster in the cell (or under in vitro conditions selected to mimic intracellular conditions) as compared to blood (or under in vitro conditions selected to mimic extracellular conditions). The rate of cleavage of candidate compounds can be determined using standard enzyme kinetics assays under conditions chosen to mimic intracellular media and compared to conditions chosen to mimic extracellular media.

[0579] ii. Phosphate-Based Cleavable Linking Groups

[0580] In another embodiment, a cleavable linker comprises a phosphate-based cleavable linking group. A phosphate-based cleavable linking group is cleaved by agents that degrade or hydrolyze the phosphate group. An example of an agent that cleaves phosphate groups in cells are enzymes such as phosphatases in cells. Examples of phosphate-based linking groups are —O—P(O)(ORk)-O—, —O—P(S)(ORk)-O—, —O—P(S)(SRk)-O—, —S—P(O)(ORk)-O—, —O—P(O)(ORk)-S—, —S—P(O)(ORk)-S—, —O—P(S)(ORk)-S—, —S—P(S)(ORk)-O—, —O—P(O)(Rk)-O—, —O—P(S)(Rk)-O—, —S—P(O)(Rk)-O—, —S—P(S)(Rk)-O—, —S—P(O)(Rk)-S—, —O—P(S)(Rk)-S—. Preferred embodiments are —O—P(O)(OH)—O—, —O—P(S)(OH)—O—, —O—P(S)(SH)—O—, —S—P(O)(OH)—O—, —O—P(O)(OH)—S—, —S—P(O)(OH)—S—, —O—P(S)(OH)—S—, —S—P(S)(OH)—O—, —O—P(O)(H)—O—, —O—P(S)(H)—O—, —S—P(O)(H)—O, —S—P(S)(H)—O—, —S—P(O)(H)—S—, —O—P(S)(H)—S—. A preferred embodiment is —O—P(O)(OH)—O—. These candidates can be evaluated using methods analogous to those described above.

[0581] iii. Acid Cleavable Linking Groups

[0582] In another embodiment, a cleavable linker comprises an acid cleavable linking group. An acid cleavable linking group is a linking group that is cleaved under acidic conditions. In preferred embodiments acid cleavable linking groups are cleaved in an acidic environment with a pH of about 6.5 or lower (e.g., about 6.0, 5.75, 5.5, 5.25, 5.0, or lower), or by agents such as enzymes that can act as a general acid. In a cell, specific low pH organelles, such as endosomes and lysosomes can provide a cleaving environment for acid cleavable linking groups. Examples of acid cleavable linking groups include but are not limited to hydrazones, esters, and esters of amino acids. Acid cleavable groups can have the general formula —C═NN—, C(O)O, or —OC(O). A preferred embodiment is when the carbon attached to the oxygen of the ester (the alkoxy group) is an aryl group, substituted alkyl group, or tertiary alkyl group such as dimethyl pentyl or t-butyl. These candidates can be evaluated using methods analogous to those described above.

[0583] iv. Ester-Based Linking Groups

[0584] In another embodiment, a cleavable linker comprises an ester-based cleavable linking group. An ester-based cleavable linking group is cleaved by enzymes such as esterases and amidases in cells. Examples of ester-based cleavable linking groups include but are not limited to esters of alkylene, alkenylene and alkynylene groups. Ester cleavable linking groups have the general formula —C(O)O—, or —OC(O)—. These candidates can be evaluated using methods analogous to those described above.

[0585] v. Peptide-Based Cleaving Groups

[0586] In yet another embodiment, a cleavable linker comprises a peptide-based cleavable linking group. A peptide-based cleavable linking group is cleaved by enzymes such as peptidases and proteases in cells. Peptide-based cleavable linking groups are peptide bonds formed between amino acids to yield oligopeptides (e.g., dipeptides, tripeptides etc.) and polypeptides. Peptide-based cleavable groups do not include the amide group (—C(O)NH—). The amide group can be formed between any alkylene, alkenylene or alkynylene. A peptide bond is a special type of amide bond formed between amino acids to yield peptides and proteins. The peptide based cleavage group is generally limited to the peptide bond (i.e., the amide bond) formed between amino acids yielding peptides and proteins and does not include the entire amide functional group. Peptide-based cleavable linking groups have the general formula —NHCHRAC(O)NHCHRBC(O)—, where RA and RB are the R groups of the two adjacent amino acids. These candidates can be evaluated using methods analogous to those described above.

[0587] In one embodiment, an iRNA of the invention is conjugated to a carbohydrate through a linker. Non-limiting examples of iRNA carbohydrate conjugates with linkers of the compositions and methods of the invention include, but are not limited to,

[chemical structure]

[chemical structure]

[chemical structure]

[chemical structure]

when one of X or Y is an oligonucleotide, the other is a hydrogen.

[0588] In certain embodiments of the compositions and methods of the invention, a ligand is one or more GalNAc (N-acetylgalactosamine) derivatives attached through a bivalent or trivalent branched linker.

[0589] In one embodiment, a dsRNA of the invention is conjugated to a bivalent or trivalent branched linker selected from the group of structures shown in any of formula (XXXII)-(XXXV):

[chemical structure]

wherein:
q2A, q2B, q3A, q3B, q4A, q4B, q5A, q5B and q5C represent independently for each occurrence 0-20 and wherein the repeating unit can be the same or different;
P^{2A}, P^{2B}, P^{3A}, P^{3B}, P^{4A}, P^{4B}, P^{5A}, P^{5B}, P^{5C}, T^{2A}, T^{2B}, T^{3A}, T^{3B}, T^{4A}, T^{4B}, T^{4A}, T^{5B}, T^{5C} are each independently for each occurrence absent, CO, NH, O, S, OC(O), NHC(O), CH₂, CH₂NH or CH₂O;
Q^{2A}, Q^{2B}, Q^{3A}, Q^{3B}, Q^{4A}, Q^{4B}, Q^{5A}, Q^{5B} are independently for each occurrence absent, alkylene, substituted alkylene wherein one or more methylenes can be interrupted or terminated by one or more of O, S, S(O), SO₂, N(R^{N}), C(R′)═C(R″), CδC or C(O);
R^{2A}, R^{2B}, R^{3A}, R^{3B}, R^{4A}, R^{4B}, R^{5A}, R^{5B}, R^{5C} are each independently for each occurrence absent, NH, O, S, CH₂, C(O)O, C(O)NH, NHCH(R^{a})C(O), —C(O)—CH(R^{a})—NH—, CO, CH═N—O,

[chemical structure]

or heterocyclyl;

[0590] L^{2A}, L^{2B}, L^{3A}, L^{3B}, L^{4A}, L^{4B}, L^{5A}, L^{5B} and L^{5C}, represent the ligand; i.e. each independently for each occurrence a monosaccharide (such as GalNAc), disaccharide, trisaccharide, tetrasaccharide, oligosaccharide, or polysaccharide; and R^{a} is H or amino acid side chain. Trivalent conjugating GalNAc derivatives are particularly useful for use with RNAi agents for inhibiting the expression of a target gene, such as those of formula (XXXVI):

[chemical structure]

[0591] wherein L^{5A}, L^{5B} and L^{5C} represent a monosaccharide, such as GalNAc derivative.

[0592] Examples of suitable bivalent and trivalent branched linker groups conjugating GalNAc derivatives include, but are not limited to, the structures recited above as formulas II, VII, XI, X, and XIII.

[0593] Representative U.S. patents that teach the preparation of RNA conjugates include, but are not limited to, U.S. Pat. Nos. 4,828,979; 4,948,882; 5,218,105; 5,525,465; 5,541,313; 5,545,730; 5,552,538; 5,578,717, 5,580,731; 5,591,584; 5,109,124; 5,118,802; 5,138,045; 5,414,077; 5,486,603; 5,512,439; 5,578,718; 5,608,046; 4,587,044; 4,605,735; 4,667,025; 4,762,779; 4,789,737; 4,824,941; 4,835,263; 4,876,335; 4,904,582; 4,958,013; 5,082,830; 5,112,963; 5,214,136; 5,082,830; 5,112,963; 5,214,136; 5,245,022; 5,254,469; 5,258,506; 5,262,536; 5,272,250; 5,292,873; 5,317,098; 5,371,241, 5,391,723; 5,416,203, 5,451,463; 5,510,475; 5,512,667; 5,514,785; 5,565,552; 5,567,810; 5,574,142; 5,585,481; 5,587,371; 5,595,726; 5,597,696; 5,599,923; 5,599,928 and 5,688,941; 6,294,664; 6,320,017; 6,576,752; 6,783,931; 6,900,297; 7,037,646; 8,106,022, the entire contents of each of which are hereby incorporated herein by reference.

[0594] It is not necessary for all positions in a given compound to be uniformly modified, and in fact more than one of the aforementioned modifications can be incorporated in a single compound or even at a single nucleoside within an iRNA. The present invention also includes iRNA compounds that are chimeric compounds.

[0595] “Chimeric” iRNA compounds or “chimeras,” in the context of this invention, are iRNA compounds, preferably dsRNAs, which contain two or more chemically distinct regions, each made up of at least one monomer unit, i.e., a nucleotide in the case of a dsRNA compound. These iRNAs typically contain at least one region wherein the RNA is modified so as to confer upon the iRNA increased resistance to nuclease degradation, increased cellular uptake, and/or increased binding affinity for the target nucleic acid. An additional region of the iRNA can serve as a substrate for enzymes capable of cleaving RNA:DNA or RNA:RNA hybrids. By way of example, RNase H is a cellular endonuclease which cleaves the RNA strand of an RNA:DNA duplex. Activation of RNase H, therefore, results in cleavage of the RNA target, thereby greatly enhancing the efficiency of iRNA inhibition of gene expression. Consequently, comparable results can often be obtained with shorter iRNAs when chimeric dsRNAs are used, compared to phosphorothioate deoxy dsRNAs hybridizing to the same target region. Cleavage of the RNA target can be routinely detected by gel electrophoresis and, if necessary, associated nucleic acid hybridization techniques known in the art.

[0596] In certain instances, the RNA of an iRNA can be modified by a non-ligand group. A number of non-ligand molecules have been conjugated to iRNAs in order to enhance the activity, cellular distribution or cellular uptake of the iRNA, and procedures for performing such conjugations are available in the scientific literature. Such non-ligand moieties have included lipid moieties, such as cholesterol (Kubo, T. et al., Biochem. Biophys. Res. Comm., 2007, 365(1):54-61; Letsinger et al., Proc. Natl. Acad. Sci. USA, 1989, 86:6553), cholic acid (Manoharan et al., Bioorg. Med. Chem. Lett., 1994, 4:1053), a thioether, e.g., hexyl-S-tritylthiol (Manoharan et al., Ann. N.Y. Acad. Sci., 1992, 660:306; Manoharan et al., Bioorg. Med. Chem. Let., 1993, 3:2765), a thiocholesterol (Oberhauser et al., Nucl. Acids Res., 1992, 20:533), an aliphatic chain, e.g., dodecandiol or undecyl residues (Saison-Behmoaras et al., EMBO J., 1991, 10:111; Kabanov et al., FEBS Lett., 1990, 259:327; Svinarchuk et al., Biochimie, 1993, 75:49), a phospholipid, e.g., di-hexadecyl-rac-glycerol or triethylammonium 1,2-di-O-hexadecyl-rac-glycero-3-H-phosphonate (Manoharan et al., Tetrahedron Lett., 1995, 36:3651; Shea et al., Nucl. Acids Res., 1990, 18:3777), a polyamine or a polyethylene glycol chain (Manoharan et al., Nucleosides & Nucleotides, 1995, 14:969), or adamantane acetic acid (Manoharan et al., Tetrahedron Lett., 1995, 36:3651), a palmityl moiety (Mishra et al., Biochim. Biophys. Acta, 1995, 1264:229), or an octadecylamine or hexylamino-carbonyl-oxycholesterol moiety (Crooke et al., J. Pharmacol. Exp. Ther., 1996, 277:923). Representative United States patents that teach the preparation of such RNA conjugates have been listed above. Typical conjugation protocols involve the synthesis of an RNAs bearing an aminolinker at one or more positions of the sequence. The amino group is then reacted with the molecule being conjugated using appropriate coupling or activating reagents. The conjugation reaction can be performed either with the RNA still bound to the solid support or following cleavage of the RNA, in solution phase. Purification of the RNA conjugate by HPLC typically affords the pure conjugate.

### IV. Delivery of an iRNA of the Invention

[0597] The delivery of an iRNA of the invention to a cell e.g., a cell within a subject, such as a human subject (e.g., a subject in need thereof, such as a subject having a complement component C5-associated disease) can be achieved in a number of different ways. For example, delivery may be performed by contacting a cell with an iRNA of the invention either in vitro or in vivo. In vivo delivery may also be performed directly by administering a composition comprising an iRNA, e.g., a dsRNA, to a subject. Alternatively, in vivo delivery may be performed indirectly by administering one or more vectors that encode and direct the expression of the iRNA. These alternatives are discussed further below.

[0598] In general, any method of delivering a nucleic acid molecule (in vitro or in vivo) can be adapted for use with an iRNA of the invention (see e.g., Akhtar S. and Julian R L. (1992) Trends Cell. Biol. 2(5):139-144 and WO94/02595, which are incorporated herein by reference in their entireties). For in vivo delivery, factors to consider in order to deliver an iRNA molecule include, for example, biological stability of the delivered molecule, prevention of non-specific effects, and accumulation of the delivered molecule in the target tissue. The non-specific effects of an iRNA can be minimized by local administration, for example, by direct injection or implantation into a tissue or topically administering the preparation. Local administration to a treatment site maximizes local concentration of the agent, limits the exposure of the agent to systemic tissues that can otherwise be harmed by the agent or that can degrade the agent, and permits a lower total dose of the iRNA molecule to be administered. Several studies have shown successful knockdown of gene products when an iRNA is administered locally. For example, intraocular delivery of a VEGF dsRNA by intravitreal injection in cynomolgus monkeys (Tolentino, M J., et al (2004) Retina 24:132-138) and subretinal injections in mice (Reich, S J., et al (2003) Mol. Vis. 9:210-216) were both shown to prevent neovascularization in an experimental model of age-related macular degeneration. In addition, direct intratumoral injection of a dsRNA in mice reduces tumor volume (Pille, J., et al (2005) Mol. Ther. 11:267-274) and can prolong survival of tumor-bearing mice (Kim, W J., et al (2006) Mol. Ther. 14:343-350; Li, S., et al (2007) Mol. Ther. 15:515-523). RNA interference has also shown success with local delivery to the CNS by direct injection (Dorn, G., et al. (2004) Nucleic Acids 32:e49; Tan, P H., et al (2005) Gene Ther. 12:59-66; Makimura, H., et al (2002) BMC Neurosci. 3:18; Shishkina, G T., et al (2004) Neuroscience 129:521-528; Thakker, E R., et al (2004) Proc. Natl. Acad. Sci. U.S.A. 101:17270-17275; Akaneya, Y., et al (2005) J. Neurophysiol. 93:594-602) and to the lungs by intranasal administration (Howard, K A., et al (2006) Mol. Ther. 14:476-484; Zhang, X., et al (2004) J. Biol. Chem. 279:10677-10684; Bitko, V., et al (2005) Nat. Med. 11:50-55). For administering an iRNA systemically for the treatment of a disease, the RNA can be modified or alternatively delivered using a drug delivery system; both methods act to prevent the rapid degradation of the dsRNA by endo- and exo-nucleases in vivo. Modification of the RNA or the pharmaceutical carrier can also permit targeting of the iRNA composition to the target tissue and avoid undesirable off-target effects. iRNA molecules can be modified by chemical conjugation to lipophilic groups such as cholesterol to enhance cellular uptake and prevent degradation. For example, an iRNA directed against ApoB conjugated to a lipophilic cholesterol moiety was injected systemically into mice and resulted in knockdown of apoB mRNA in both the liver and jejunum (Soutschek, J., et al (2004) Nature 432:173-178). Conjugation of an iRNA to an aptamer has been shown to inhibit tumor growth and mediate tumor regression in a mouse model of prostate cancer (McNamara, J O., et al (2006) Nat. Biotechnol. 24:1005-1015). In an alternative embodiment, the iRNA can be delivered using drug delivery systems such as a nanoparticle, a dendrimer, a polymer, liposomes, or a cationic delivery system. Positively charged cationic delivery systems facilitate binding of an iRNA molecule (negatively charged) and also enhance interactions at the negatively charged cell membrane to permit efficient uptake of an iRNA by the cell. Cationic lipids, dendrimers, or polymers can either be bound to an iRNA, or induced to form a vesicle or micelle (see e.g., Kim S H., et al (2008) Journal of Controlled Release 129(2):107-116) that encases an iRNA. The formation of vesicles or micelles further prevents degradation of the iRNA when administered systemically. Methods for making and administering cationic-iRNA complexes are well within the abilities of one skilled in the art (see e.g., Sorensen, D R., et al (2003) J. Mol. Biol 327:761-766; Verma, U N., et al (2003) Clin. Cancer Res. 9:1291-1300; Arnold, A S et al (2007) J. Hypertens. 25:197-205, which are incorporated herein by reference in their entirety). Some non-limiting examples of drug delivery systems useful for systemic delivery of iRNAs include DOTAP (Sorensen, D R., et al (2003), supra; Verma, U N., et al (2003), supra), Oligofectamine, “solid nucleic acid lipid particles” (Zimmermann, T S., et al (2006) Nature 441:111-114), cardiolipin (Chien, P Y., et al (2005) Cancer Gene Ther. 12:321-328; Pal, A., et al (2005) Int J. Oncol. 26:1087-1091), polyethyleneimine (Bonnet M E., et al (2008) Pharm. Res. August 16 Epub ahead of print; Aigner, A. (2006) J. Biomed. Biotechnol. 71659), Arg-Gly-Asp (RGD) peptides (Liu, S. (2006) Mol. Pharm. 3:472-487), and polyamidoamines (Tomalia, D A., et al (2007) Biochem. Soc. Trans. 35:61-67; Yoo, H., et al (1999) Pharm. Res. 16:1799-1804). In some embodiments, an iRNA forms a complex with cyclodextrin for systemic administration. Methods for administration and pharmaceutical compositions of iRNAs and cyclodextrins can be found in U.S. Pat. No. 7,427,605, which is herein incorporated by reference in its entirety.

[0599] A. Vector Encoded iRNAs of the Invention

[0600] iRNA targeting the C5 gene can be expressed from transcription units inserted into DNA or RNA vectors (see, e.g., Couture, A, et al., TIG. (1996), 12:5-10; Skillern, A., et al., International PCT Publication No. WO 00/22113, Conrad, International PCT Publication No. WO 00/22114, and Conrad, U.S. Pat. No. 6,054,299). Expression can be transient (on the order of hours to weeks) or sustained (weeks to months or longer), depending upon the specific construct used and the target tissue or cell type. These transgenes can be introduced as a linear construct, a circular plasmid, or a viral vector, which can be an integrating or non-integrating vector. The transgene can also be constructed to permit it to be inherited as an extrachromosomal plasmid (Gassmann, et al., Proc. Natl. Acad. Sci. USA (1995) 92:1292).

[0601] The individual strand or strands of an iRNA can be transcribed from a promoter on an expression vector. Where two separate strands are to be expressed to generate, for example, a dsRNA, two separate expression vectors can be co-introduced (e.g., by transfection or infection) into a target cell. Alternatively each individual strand of a dsRNA can be transcribed by promoters both of which are located on the same expression plasmid. In one embodiment, a dsRNA is expressed as inverted repeat polynucleotides joined by a linker polynucleotide sequence such that the dsRNA has a stem and loop structure.

[0602] iRNA expression vectors are generally DNA plasmids or viral vectors. Expression vectors compatible with eukaryotic cells, preferably those compatible with vertebrate cells, can be used to produce recombinant constructs for the expression of an iRNA as described herein. Eukaryotic cell expression vectors are well known in the art and are available from a number of commercial sources. Typically, such vectors are provided containing convenient restriction sites for insertion of the desired nucleic acid segment. Delivery of iRNA expressing vectors can be systemic, such as by intravenous or intramuscular administration, by administration to target cells ex-planted from the patient followed by reintroduction into the patient, or by any other means that allows for introduction into a desired target cell.

[0603] iRNA expression plasmids can be transfected into target cells as a complex with cationic lipid carriers (e.g., Oligofectamine) or non-cationic lipid-based carriers (e.g., Transit-TKO™). Multiple lipid transfections for iRNA-mediated knockdowns targeting different regions of a target RNA over a period of a week or more are also contemplated by the invention. Successful introduction of vectors into host cells can be monitored using various known methods. For example, transient transfection can be signaled with a reporter, such as a fluorescent marker, such as Green Fluorescent Protein (GFP). Stable transfection of cells ex vivo can be ensured using markers that provide the transfected cell with resistance to specific environmental factors (e.g., antibiotics and drugs), such as hygromycin B resistance.

[0604] Viral vector systems which can be utilized with the methods and compositions described herein include, but are not limited to, (a) adenovirus vectors; (b) retrovirus vectors, including but not limited to lentiviral vectors, moloney murine leukemia virus, etc.; (c) adeno-associated virus vectors; (d) herpes simplex virus vectors; (e) SV 40 vectors; (f) polyoma virus vectors; (g) papilloma virus vectors; (h) picornavirus vectors; (i) pox virus vectors such as an orthopox, e.g., vaccinia virus vectors or avipox, e.g. canary pox or fowl pox; and (j) a helper-dependent or gutless adenovirus. Replication-defective viruses can also be advantageous. Different vectors will or will not become incorporated into the cells' genome. The constructs can include viral sequences for transfection, if desired. Alternatively, the construct can be incorporated into vectors capable of episomal replication, e.g. EPV and EBV vectors. Constructs for the recombinant expression of an iRNA will generally require regulatory elements, e.g., promoters, enhancers, etc., to ensure the expression of the iRNA in target cells. Other aspects to consider for vectors and constructs are further described below.

[0605] Vectors useful for the delivery of an iRNA will include regulatory elements (promoter, enhancer, etc.) sufficient for expression of the iRNA in the desired target cell or tissue. The regulatory elements can be chosen to provide either constitutive or regulated/inducible expression.

[0606] Expression of the iRNA can be precisely regulated, for example, by using an inducible regulatory sequence that is sensitive to certain physiological regulators, e.g., circulating glucose levels, or hormones (Docherty et al., 1994, FASEB J. 8:20-24). Such inducible expression systems, suitable for the control of dsRNA expression in cells or in mammals include, for example, regulation by ecdysone, by estrogen, progesterone, tetracycline, chemical inducers of dimerization, and isopropyl-beta-D1-thiogalactopyranoside (IPTG). A person skilled in the art would be able to choose the appropriate regulatory/promoter sequence based on the intended use of the iRNA transgene.

[0607] Viral vectors that contain nucleic acid sequences encoding an iRNA can be used. For example, a retroviral vector can be used (see Miller et al., Meth. Enzymol. 217:581-599 (1993)). These retroviral vectors contain the components necessary for the correct packaging of the viral genome and integration into the host cell DNA. The nucleic acid sequences encoding an iRNA are cloned into one or more vectors, which facilitate delivery of the nucleic acid into a patient. More detail about retroviral vectors can be found, for example, in Boesen et al., Biotherapy 6:291-302 (1994), which describes the use of a retroviral vector to deliver the mdr1 gene to hematopoietic stem cells in order to make the stem cells more resistant to chemotherapy. Other references illustrating the use of retroviral vectors in gene therapy are: Clowes et al., J. Clin. Invest. 93:644-651 (1994); Kiem et al., Blood 83:1467-1473 (1994); Salmons and Gunzberg, Human Gene Therapy 4:129-141 (1993); and Grossman and Wilson, Curr. Opin. in Genetics and Devel. 3:110-114 (1993). Lentiviral vectors contemplated for use include, for example, the HIV based vectors described in U.S. Pat. Nos. 6,143,520; 5,665,557; and 5,981,276, which are herein incorporated by reference.

[0608] Adenoviruses are also contemplated for use in delivery of iRNAs of the invention. Adenoviruses are especially attractive vehicles, e.g., for delivering genes to respiratory epithelia. Adenoviruses naturally infect respiratory epithelia where they cause a mild disease. Other targets for adenovirus-based delivery systems are liver, the central nervous system, endothelial cells, and muscle. Adenoviruses have the advantage of being capable of infecting non-dividing cells. Kozarsky and Wilson, Current Opinion in Genetics and Development 3:499-503 (1993) present a review of adenovirus-based gene therapy. Bout et al., Human Gene Therapy 5:3-10 (1994) demonstrated the use of adenovirus vectors to transfer genes to the respiratory epithelia of rhesus monkeys. Other instances of the use of adenoviruses in gene therapy can be found in Rosenfeld et al., Science 252:431-434 (1991); Rosenfeld et al., Cell 68:143-155 (1992); Mastrangeli et al., J. Clin. Invest. 91:225-234 (1993); PCT Publication WO94/12649; and Wang, et al., Gene Therapy 2:775-783 (1995). A suitable AV vector for expressing an iRNA featured in the invention, a method for constructing the recombinant AV vector, and a method for delivering the vector into target cells, are described in Xia H et al. (2002), Nat. Biotech. 20: 1006-1010.

[0609] Adeno-associated virus (AAV) vectors may also be used to delivery an iRNA of the invention (Walsh et al., Proc. Soc. Exp. Biol. Med. 204:289-300 (1993); U.S. Pat. No. 5,436,146). In one embodiment, the iRNA can be expressed as two separate, complementary single-stranded RNA molecules from a recombinant AAV vector having, for example, either the U6 or H1 RNA promoters, or the cytomegalovirus (CMV) promoter. Suitable AAV vectors for expressing the dsRNA featured in the invention, methods for constructing the recombinant AV vector, and methods for delivering the vectors into target cells are described in Samulski R et al. (1987), J. Virol. 61: 3096-3101; Fisher K J et al. (1996), J. Virol, 70: 520-532; Samulski R et al. (1989), J. Virol. 63: 3822-3826; U.S. Pat. No. 5,252,479; U.S. Pat. No. 5,139,941; International Patent Application No. WO 94/13788; and International Patent Application No. WO 93/24641, the entire disclosures of which are herein incorporated by reference.

[0610] Another viral vector suitable for delivery of an iRNA of the invention is a pox virus such as a vaccinia virus, for example an attenuated vaccinia such as Modified Virus Ankara (MVA) or NYVAC, an avipox such as fowl pox or canary pox.

[0611] The tropism of viral vectors can be modified by pseudotyping the vectors with envelope proteins or other surface antigens from other viruses, or by substituting different viral capsid proteins, as appropriate. For example, lentiviral vectors can be pseudotyped with surface proteins from vesicular stomatitis virus (VSV), rabies, Ebola, Mokola, and the like. AAV vectors can be made to target different cells by engineering the vectors to express different capsid protein serotypes; see, e.g., Rabinowitz J E et al. (2002), J Virol 76:791-801, the entire disclosure of which is herein incorporated by reference.

[0612] The pharmaceutical preparation of a vector can include the vector in an acceptable diluent, or can include a slow release matrix in which the gene delivery vehicle is imbedded. Alternatively, where the complete gene delivery vector can be produced intact from recombinant cells, e.g., retroviral vectors, the pharmaceutical preparation can include one or more cells which produce the gene delivery system.

### V. Pharmaceutical Compositions of the Invention

[0613] The present invention also includes pharmaceutical compositions and formulations which include the iRNAs of the invention. In one embodiment, provided herein are pharmaceutical compositions containing an iRNA, as described herein, and a pharmaceutically acceptable carrier.

[0614] The phrase “pharmaceutically acceptable” is employed herein to refer to those compounds, materials, compositions, and/or dosage forms which are, within the scope of sound medical judgment, suitable for use in contact with the tissues of human subjects and animal subjects without excessive toxicity, irritation, allergic response, or other problem or complication, commensurate with a reasonable benefit/risk ratio.

[0615] The phrase “pharmaceutically-acceptable carrier” as used herein means a pharmaceutically-acceptable material, composition or vehicle, such as a liquid or solid filler, diluent, excipient, manufacturing aid (e.g., lubricant, talc magnesium, calcium or zinc stearate, or steric acid), or solvent encapsulating material, involved in carrying or transporting the subject compound from one organ, or portion of the body, to another organ, or portion of the body. Each carrier must be “acceptable” in the sense of being compatible with the other ingredients of the formulation and not injurious to the subject being treated. Some examples of materials which can serve as pharmaceutically-acceptable carriers include: (1) sugars, such as lactose, glucose and sucrose; (2) starches, such as corn starch and potato starch; (3) cellulose, and its derivatives, such as sodium carboxymethyl cellulose, ethyl cellulose and cellulose acetate; (4) powdered tragacanth; (5) malt; (6) gelatin; (7) lubricating agents, such as magnesium state, sodium lauryl sulfate and talc; (8) excipients, such as cocoa butter and suppository waxes; (9) oils, such as peanut oil, cottonseed oil, safflower oil, sesame oil, olive oil, corn oil and soybean oil; (10) glycols, such as propylene glycol; (11) polyols, such as glycerin, sorbitol, mannitol and polyethylene glycol; (12) esters, such as ethyl oleate and ethyl laurate; (13) agar; (14) buffering agents, such as magnesium hydroxide and aluminum hydroxide; (15) alginic acid; (16) pyrogen-free water; (17) isotonic saline; (18) Ringer's solution; (19) ethyl alcohol; (20) pH buffered solutions; (21) polyesters, polycarbonates and/or polyanhydrides; (22) bulking agents, such as polypeptides and amino acids (23) serum component, such as serum albumin, HDL and LDL; and (22) other non-toxic compatible substances employed in pharmaceutical formulations.

[0616] The pharmaceutical compositions containing the iRNA are useful for treating a disease or disorder associated with the expression or activity of a C5 gene, e.g. a complement component C5-associated disease. Such pharmaceutical compositions are formulated based on the mode of delivery. One example is compositions that are formulated for systemic administration via parenteral delivery, e.g., by subcutaneous (SC) or intravenous (IV) delivery. Another example is compositions that are formulated for direct delivery into the brain parenchyma, e.g., by infusion into the brain, such as by continuous pump infusion. The pharmaceutical compositions of the invention may be administered in dosages sufficient to inhibit expression of a C5 gene. In general, a suitable dose of an iRNA of the invention will be in the range of about 0.001 to about 200.0 milligrams per kilogram body weight of the recipient per day, generally in the range of about 1 to 50 mg per kilogram body weight per day. For example, the dsRNA can be administered at about 0.01 mg/kg, about 0.05 mg/kg, about 0.5 mg/kg, about 1 mg/kg, about 1.5 mg/kg, about 2 mg/kg, about 3 mg/kg, about 10 mg/kg, about 20 mg/kg, about 30 mg/kg, about 40 mg/kg, or about 50 mg/kg per single dose.

[0617] For example, the dsRNA may be administered at a dose of about 0.1, 0.2, 0.3, 0.4, 0.5, 0.6, 0.7, 0.8, 0.9, 1, 1.1, 1.2, 1.3, 1.4, 1.5, 1.6, 1.7, 1.8, 1.9, 2, 2.1, 2.2, 2.3, 2.4, 2.5, 2.6, 2.7, 2.8, 2.9, 3, 3.1, 3.2, 3.3, 3.4, 3.5, 3.6, 3.7, 3.8, 3.9, 4, 4.1, 4.2, 4.3, 4.4, 4.5, 4.6, 4.7, 4.8, 4.9, 5, 5.1, 5.2, 5.3, 5.4, 5.5, 5.6, 5.7, 5.8, 5.9, 6, 6.1, 6.2, 6.3, 6.4, 6.5, 6.6, 6.7, 6.8, 6.9, 7, 7.1, 7.2, 7.3, 7.4, 7.5, 7.6, 7.7, 7.8, 7.9, 8, 8.1, 8.2, 8.3, 8.4, 8.5, 8.6, 8.7, 8.8, 8.9, 9, 9.1, 9.2, 9.3, 9.4, 9.5, 9.6, 9.7, 9.8, 9.9, or about 10 mg/kg. Values and ranges intermediate to the recited values are also intended to be part of this invention.

[0618] In another embodiment, the dsRNA is administered at a dose of about 0.1 to about 50 mg/kg, about 0.25 to about 50 mg/kg, about 0.5 to about 50 mg/kg, about 0.75 to about 50 mg/kg, about 1 to about 50 mg/mg, about 1.5 to about 50 mg/kb, about 2 to about 50 mg/kg, about 2.5 to about 50 mg/kg, about 3 to about 50 mg/kg, about 3.5 to about 50 mg/kg, about 4 to about 50 mg/kg, about 4.5 to about 50 mg/kg, about 5 to about 50 mg/kg, about 7.5 to about 50 mg/kg, about 10 to about 50 mg/kg, about 15 to about 50 mg/kg, about 20 to about 50 mg/kg, about 20 to about 50 mg/kg, about 25 to about 50 mg/kg, about 25 to about 50 mg/kg, about 30 to about 50 mg/kg, about 35 to about 50 mg/kg, about 40 to about 50 mg/kg, about 45 to about 50 mg/kg, about 0.1 to about 45 mg/kg, about 0.25 to about 45 mg/kg, about 0.5 to about 45 mg/kg, about 0.75 to about 45 mg/kg, about 1 to about 45 mg/mg, about 1.5 to about 45 mg/kb, about 2 to about 45 mg/kg, about 2.5 to about 45 mg/kg, about 3 to about 45 mg/kg, about 3.5 to about 45 mg/kg, about 4 to about 45 mg/kg, about 4.5 to about 45 mg/kg, about 5 to about 45 mg/kg, about 7.5 to about 45 mg/kg, about 10 to about 45 mg/kg, about 15 to about 45 mg/kg, about 20 to about 45 mg/kg, about 20 to about 45 mg/kg, about 25 to about 45 mg/kg, about 25 to about 45 mg/kg, about 30 to about 45 mg/kg, about 35 to about 45 mg/kg, about 40 to about 45 mg/kg, about 0.1 to about 40 mg/kg, about 0.25 to about 40 mg/kg, about 0.5 to about 40 mg/kg, about 0.75 to about 40 mg/kg, about 1 to about 40 mg/mg, about 1.5 to about 40 mg/kb, about 2 to about 40 mg/kg, about 2.5 to about 40 mg/kg, about 3 to about 40 mg/kg, about 3.5 to about 40 mg/kg, about 4 to about 40 mg/kg, about 4.5 to about 40 mg/kg, about 5 to about 40 mg/kg, about 7.5 to about 40 mg/kg, about 10 to about 40 mg/kg, about 15 to about 40 mg/kg, about 20 to about 40 mg/kg, about 20 to about 40 mg/kg, about 25 to about 40 mg/kg, about 25 to about 40 mg/kg, about 30 to about 40 mg/kg, about 35 to about 40 mg/kg, about 0.1 to about 30 mg/kg, about 0.25 to about 30 mg/kg, about 0.5 to about 30 mg/kg, about 0.75 to about 30 mg/kg, about 1 to about 30 mg/mg, about 1.5 to about 30 mg/kb, about 2 to about 30 mg/kg, about 2.5 to about 30 mg/kg, about 3 to about 30 mg/kg, about 3.5 to about 30 mg/kg, about 4 to about 30 mg/kg, about 4.5 to about 30 mg/kg, about 5 to about 30 mg/kg, about 7.5 to about 30 mg/kg, about 10 to about 30 mg/kg, about 15 to about 30 mg/kg, about 20 to about 30 mg/kg, about 20 to about 30 mg/kg, about 25 to about 30 mg/kg, about 0.1 to about 20 mg/kg, about 0.25 to about 20 mg/kg, about 0.5 to about 20 mg/kg, about 0.75 to about 20 mg/kg, about 1 to about 20 mg/mg, about 1.5 to about 20 mg/kb, about 2 to about 20 mg/kg, about 2.5 to about 20 mg/kg, about 3 to about 20 mg/kg, about 3.5 to about 20 mg/kg, about 4 to about 20 mg/kg, about 4.5 to about 20 mg/kg, about 5 to about 20 mg/kg, about 7.5 to about 20 mg/kg, about 10 to about 20 mg/kg, or about 15 to about 20 mg/kg. Values and ranges intermediate to the recited values are also intended to be part of this invention.

[0619] For example, the dsRNA may be administered at a dose of about 0.01, 0.02, 0.03, 0.04, 0.05, 0.06, 0.07, 0.08, 0.09, 0.1, 0.2, 0.3, 0.4, 0.5, 0.6, 0.7, 0.8, 0.9, 1, 1.1, 1.2, 1.3, 1.4, 1.5, 1.6, 1.7, 1.8, 1.9, 2, 2.1, 2.2, 2.3, 2.4, 2.5, 2.6, 2.7, 2.8, 2.9, 3, 3.1, 3.2, 3.3, 3.4, 3.5, 3.6, 3.7, 3.8, 3.9, 4, 4.1, 4.2, 4.3, 4.4, 4.5, 4.6, 4.7, 4.8, 4.9, 5, 5.1, 5.2, 5.3, 5.4, 5.5, 5.6, 5.7, 5.8, 5.9, 6, 6.1, 6.2, 6.3, 6.4, 6.5, 6.6, 6.7, 6.8, 6.9, 7, 7.1, 7.2, 7.3, 7.4, 7.5, 7.6, 7.7, 7.8, 7.9, 8, 8.1, 8.2, 8.3, 8.4, 8.5, 8.6, 8.7, 8.8, 8.9, 9, 9.1, 9.2, 9.3, 9.4, 9.5, 9.6, 9.7, 9.8, 9.9, or about 10 mg/kg. Values and ranges intermediate to the recited values are also intended to be part of this invention.

[0620] In another embodiment, the dsRNA is administered at a dose of about 0.5 to about 50 mg/kg, about 0.75 to about 50 mg/kg, about 1 to about 50 mg/mg, about 1.5 to about 50 mg/kb, about 2 to about 50 mg/kg, about 2.5 to about 50 mg/kg, about 3 to about 50 mg/kg, about 3.5 to about 50 mg/kg, about 4 to about 50 mg/kg, about 4.5 to about 50 mg/kg, about 5 to about 50 mg/kg, about 7.5 to about 50 mg/kg, about 10 to about 50 mg/kg, about 15 to about 50 mg/kg, about 20 to about 50 mg/kg, about 20 to about 50 mg/kg, about 25 to about 50 mg/kg, about 25 to about 50 mg/kg, about 30 to about 50 mg/kg, about 35 to about 50 mg/kg, about 40 to about 50 mg/kg, about 45 to about 50 mg/kg, about 0.5 to about 45 mg/kg, about 0.75 to about 45 mg/kg, about 1 to about 45 mg/mg, about 1.5 to about 45 mg/kb, about 2 to about 45 mg/kg, about 2.5 to about 45 mg/kg, about 3 to about 45 mg/kg, about 3.5 to about 45 mg/kg, about 4 to about 45 mg/kg, about 4.5 to about 45 mg/kg, about 5 to about 45 mg/kg, about 7.5 to about 45 mg/kg, about 10 to about 45 mg/kg, about 15 to about 45 mg/kg, about 20 to about 45 mg/kg, about 20 to about 45 mg/kg, about 25 to about 45 mg/kg, about 25 to about 45 mg/kg, about 30 to about 45 mg/kg, about 35 to about 45 mg/kg, about 40 to about 45 mg/kg, about 0.5 to about 40 mg/kg, about 0.75 to about 40 mg/kg, about 1 to about 40 mg/mg, about 1.5 to about 40 mg/kb, about 2 to about 40 mg/kg, about 2.5 to about 40 mg/kg, about 3 to about 40 mg/kg, about 3.5 to about 40 mg/kg, about 4 to about 40 mg/kg, about 4.5 to about 40 mg/kg, about 5 to about 40 mg/kg, about 7.5 to about 40 mg/kg, about 10 to about 40 mg/kg, about 15 to about 40 mg/kg, about 20 to about 40 mg/kg, about 20 to about 40 mg/kg, about 25 to about 40 mg/kg, about 25 to about 40 mg/kg, about 30 to about 40 mg/kg, about 35 to about 40 mg/kg, about 0.5 to about 30 mg/kg, about 0.75 to about 30 mg/kg, about 1 to about 30 mg/mg, about 1.5 to about 30 mg/kb, about 2 to about 30 mg/kg, about 2.5 to about 30 mg/kg, about 3 to about 30 mg/kg, about 3.5 to about 30 mg/kg, about 4 to about 30 mg/kg, about 4.5 to about 30 mg/kg, about 5 to about 30 mg/kg, about 7.5 to about 30 mg/kg, about 10 to about 30 mg/kg, about 15 to about 30 mg/kg, about 20 to about 30 mg/kg, about 20 to about 30 mg/kg, about 25 to about 30 mg/kg, about 0.5 to about 20 mg/kg, about 0.75 to about 20 mg/kg, about 1 to about 20 mg/mg, about 1.5 to about 20 mg/kb, about 2 to about 20 mg/kg, about 2.5 to about 20 mg/kg, about 3 to about 20 mg/kg, about 3.5 to about 20 mg/kg, about 4 to about 20 mg/kg, about 4.5 to about 20 mg/kg, about 5 to about 20 mg/kg, about 7.5 to about 20 mg/kg, about 10 to about 20 mg/kg, or about 15 to about 20 mg/kg. In one embodiment, the dsRNA is administered at a dose of about 10 mg/kg to about 30 mg/kg. Values and ranges intermediate to the recited values are also intended to be part of this invention.

[0621] For example, subjects can be administered, e.g., subcutaneously or intravenously, a single therapeutic amount of iRNA, such as about 0.1, 0.125, 0.15, 0.175, 0.2, 0.225, 0.25, 0.275, 0.3, 0.325, 0.35, 0.375, 0.4, 0.425, 0.45, 0.475, 0.5, 0.525, 0.55, 0.575, 0.6, 0.625, 0.65, 0.675, 0.7, 0.725, 0.75, 0.775, 0.8, 0.825, 0.85, 0.875, 0.9, 0.925, 0.95, 0.975, 1, 1.1, 1.2, 1.3, 1.4, 1.5, 1.6, 1.7, 1.8, 1.9, 2, 2.1, 2.2, 2.3, 2.4, 2.5, 2.6, 2.7, 2.8, 2.9, 3, 3.1, 3.2, 3.3, 3.4, 3.5, 3.6, 3.7, 3.8, 3.9, 4, 4.1, 4.2, 4.3, 4.4, 4.5, 4.6, 4.7, 4.8, 4.9, 5, 5.1, 5.2, 5.3, 5.4, 5.5, 5.6, 5.7, 5.8, 5.9, 6, 6.1, 6.2, 6.3, 6.4, 6.5, 6.6, 6.7, 6.8, 6.9, 7, 7.1, 7.2, 7.3, 7.4, 7.5, 7.6, 7.7, 7.8, 7.9, 8, 8.1, 8.2, 8.3, 8.4, 8.5, 8.6, 8.7, 8.8, 8.9, 9, 9.1, 9.2, 9.3, 9.4, 9.5, 9.6, 9.7, 9.8, 9.9, 10, 10.5, 11, 11.5, 12, 12.5, 13, 13.5, 14, 14.5, 15, 15.5, 16, 16.5, 17, 17.5, 18, 18.5, 19, 19.5, 20, 20.5, 21, 21.5, 22, 22.5, 23, 23.5, 24, 24.5, 25, 25.5, 26, 26.5, 27, 27.5, 28, 28.5, 29, 29.5, 30, 31, 32, 33, 34, 34, 35, 36, 37, 38, 39, 40, 41, 42, 43, 44, 45, 46, 47, 48, 49, or about 50 mg/kg. Values and ranges intermediate to the recited values are also intended to be part of this invention.

[0622] In some embodiments, subjects are administered, e.g., subcutaneously or intravenously, multiple doses of a therapeutic amount of iRNA, such as a dose about 0.1, 0.125, 0.15, 0.175, 0.2, 0.225, 0.25, 0.275, 0.3, 0.325, 0.35, 0.375, 0.4, 0.425, 0.45, 0.475, 0.5, 0.525, 0.55, 0.575, 0.6, 0.625, 0.65, 0.675, 0.7, 0.725, 0.75, 0.775, 0.8, 0.825, 0.85, 0.875, 0.9, 0.925, 0.95, 0.975, 1, 1.1, 1.2, 1.3, 1.4, 1.5, 1.6, 1.7, 1.8, 1.9, 2, 2.1, 2.2, 2.3, 2.4, 2.5, 2.6, 2.7, 2.8, 2.9, 3, 3.1, 3.2, 3.3, 3.4, 3.5, 3.6, 3.7, 3.8, 3.9, 4, 4.1, 4.2, 4.3, 4.4, 4.5, 4.6, 4.7, 4.8, 4.9, 5, 5.1, 5.2, 5.3, 5.4, 5.5, 5.6, 5.7, 5.8, 5.9, 6, 6.1, 6.2, 6.3, 6.4, 6.5, 6.6, 6.7, 6.8, 6.9, 7, 7.1, 7.2, 7.3, 7.4, 7.5, 7.6, 7.7, 7.8, 7.9, 8, 8.1, 8.2, 8.3, 8.4, 8.5, 8.6, 8.7, 8.8, 8.9, 9, 9.1, 9.2, 9.3, 9.4, 9.5, 9.6, 9.7, 9.8, 9.9, 10, 10.5, 11, 11.5, 12, 12.5, 13, 13.5, 14, 14.5, 15, 15.5, 16, 16.5, 17, 17.5, 18, 18.5, 19, 19.5, 20, 20.5, 21, 21.5, 22, 22.5, 23, 23.5, 24, 24.5, 25, 25.5, 26, 26.5, 27, 27.5, 28, 28.5, 29, 29.5, 30, 31, 32, 33, 34, 34, 35, 36, 37, 38, 39, 40, 41, 42, 43, 44, 45, 46, 47, 48, 49, or about 50 mg/kg. A multi-dose regimine may include administration of a therapeutic amount of iRNA daily, such as for two days, three days, four days, five days, six days, seven days, or longer.

[0623] In other embodiments, subjects are administered, e.g., subcutaneously or intravenously, a repeat dose of a therapeutic amount of iRNA, such as a dose about 0.1, 0.125, 0.15, 0.175, 0.2, 0.225, 0.25, 0.275, 0.3, 0.325, 0.35, 0.375, 0.4, 0.425, 0.45, 0.475, 0.5, 0.525, 0.55, 0.575, 0.6, 0.625, 0.65, 0.675, 0.7, 0.725, 0.75, 0.775, 0.8, 0.825, 0.85, 0.875, 0.9, 0.925, 0.95, 0.975, 1, 1.1, 1.2, 1.3, 1.4, 1.5, 1.6, 1.7, 1.8, 1.9, 2, 2.1, 2.2, 2.3, 2.4, 2.5, 2.6, 2.7, 2.8, 2.9, 3, 3.1, 3.2, 3.3, 3.4, 3.5, 3.6, 3.7, 3.8, 3.9, 4, 4.1, 4.2, 4.3, 4.4, 4.5, 4.6, 4.7, 4.8, 4.9, 5, 5.1, 5.2, 5.3, 5.4, 5.5, 5.6, 5.7, 5.8, 5.9, 6, 6.1, 6.2, 6.3, 6.4, 6.5, 6.6, 6.7, 6.8, 6.9, 7, 7.1, 7.2, 7.3, 7.4, 7.5, 7.6, 7.7, 7.8, 7.9, 8, 8.1, 8.2, 8.3, 8.4, 8.5, 8.6, 8.7, 8.8, 8.9, 9, 9.1, 9.2, 9.3, 9.4, 9.5, 9.6, 9.7, 9.8, 9.9, 10, 10.5, 11, 11.5, 12, 12.5, 13, 13.5, 14, 14.5, 15, 15.5, 16, 16.5, 17, 17.5, 18, 18.5, 19, 19.5, 20, 20.5, 21, 21.5, 22, 22.5, 23, 23.5, 24, 24.5, 25, 25.5, 26, 26.5, 27, 27.5, 28, 28.5, 29, 29.5, 30, 31, 32, 33, 34, 34, 35, 36, 37, 38, 39, 40, 41, 42, 43, 44, 45, 46, 47, 48, 49, or about 50 mg/kg. A repeat-dose regimine may include administration of a therapeutic amount of iRNA on a regular basis, such as every other day, every third day, every fourth day, twice a week, once a week, every other week, or once a month.

[0624] The pharmaceutical composition can be administered by intravenous infusion over a period of time, such as over a 5, 6, 7, 8, 9, 10, 11, 12, 13, 14, 15, 16, 17, 18, 19, 20, and 21, 22, 23, 24, or about a 25 minute period. The administration may be repeated, for example, on a regular basis, such as weekly, biweekly (i.e., every two weeks) for one month, two months, three months, four months or longer. After an initial treatment regimen, the treatments can be administered on a less frequent basis. For example, after administration weekly or biweekly for three months, administration can be repeated once per month, for six months or a year or longer.

[0625] The pharmaceutical composition can be administered once daily, or the iRNA can be administered as two, three, or more sub-doses at appropriate intervals throughout the day or even using continuous infusion or delivery through a controlled release formulation. In that case, the iRNA contained in each sub-dose must be correspondingly smaller in order to achieve the total daily dosage. The dosage unit can also be compounded for delivery over several days, e.g., using a conventional sustained release formulation which provides sustained release of the iRNA over a several day period. Sustained release formulations are well known in the art and are particularly useful for delivery of agents at a particular site, such as could be used with the agents of the present invention. In this embodiment, the dosage unit contains a corresponding multiple of the daily dose.

[0626] In other embodiments, a single dose of the pharmaceutical compositions can be long lasting, such that subsequent doses are administered at not more than 3, 4, or 5 day intervals, or at not more than 1, 2, 3, or 4 week intervals. In some embodiments of the invention, a single dose of the pharmaceutical compositions of the invention is administered once per week. In other embodiments of the invention, a single dose of the pharmaceutical compositions of the invention is administered bi-monthly.

[0627] The skilled artisan will appreciate that certain factors can influence the dosage and timing required to effectively treat a subject, including but not limited to the severity of the disease or disorder, previous treatments, the general health and/or age of the subject, and other diseases present. Moreover, treatment of a subject with a therapeutically effective amount of a composition can include a single treatment or a series of treatments. Estimates of effective dosages and in vivo half-lives for the individual iRNAs encompassed by the invention can be made using conventional methodologies or on the basis of in vivo testing using an appropriate animal model, as described elsewhere herein.

[0628] Advances in mouse genetics have generated a number of mouse models for the study of various human diseases, such as a disorder that would benefit from reduction in the expression of C5. Such models can be used for in vivo testing of iRNA, as well as for determining a therapeutically effective dose. Suitable mouse models are known in the art and include, for example, collagen-induced arthritis mouse model (Courtenay, J. S., et al. (1980) Nature 283, 666-668), myocardial ischemia (Homeister J W and Lucchesi B R (1994) Annu Rev Pharmacol Toxicol 34:17-40), ovalbumin induced asthma mouse models (e.g., Tomkinson A., et al. (2001). J. Immunol. 166, 5792-5800), (NZB×NZW)F1, MRL/Fas^{lpr} (MRL/lpr) and BXSB mouse models (Theofilopoulos, A. N. and Kono, D. H. 1999. Murine lupus models: gene-specific and genome-wide studies. In Lahita R. G., ed., Systemic Lupus Erythematosus, 3rd edn, p. 145. Academic Press, San Diego, Calif.), mouse aHUS model (Goicoechea de Jorge et al. (2011) The development of atypical hemolytic uremic syndrome depends on complement C5, J Am Soc Nephrol 22:137-145.

[0629] The pharmaceutical compositions of the present invention can be administered in a number of ways depending upon whether local or systemic treatment is desired and upon the area to be treated. Administration can be topical (e.g., by a transdermal patch), pulmonary, e.g., by inhalation or insufflation of powders or aerosols, including by nebulizer; intratracheal, intranasal, epidermal and transdermal, oral or parenteral. Parenteral administration includes intravenous, intraarterial, subcutaneous, intraperitoneal or intramuscular injection or infusion; subdermal, e.g., via an implanted device; or intracranial, e.g., by intraparenchymal, intrathecal or intraventricular, administration.

[0630] The iRNA can be delivered in a manner to target a particular tissue, such as the liver (e.g., the hepatocytes of the liver).

[0631] Pharmaceutical compositions and formulations for topical administration can include transdermal patches, ointments, lotions, creams, gels, drops, suppositories, sprays, liquids and powders. Conventional pharmaceutical carriers, aqueous, powder or oily bases, thickeners and the like can be necessary or desirable. Coated condoms, gloves and the like can also be useful. Suitable topical formulations include those in which the iRNAs featured in the invention are in admixture with a topical delivery agent such as lipids, liposomes, fatty acids, fatty acid esters, steroids, chelating agents and surfactants. Suitable lipids and liposomes include neutral (e.g., dioleoylphosphatidyl DOPE ethanolamine, dimyristoylphosphatidyl choline DMPC, distearolyphosphatidyl choline) negative (e.g., dimyristoylphosphatidyl glycerol DMPG) and cationic (e.g., dioleoyltetramethylaminopropyl DOTAP and dioleoylphosphatidyl ethanolamine DOTMA). iRNAs featured in the invention can be encapsulated within liposomes or can form complexes thereto, in particular to cationic liposomes. Alternatively, iRNAs can be complexed to lipids, in particular to cationic lipids. Suitable fatty acids and esters include but are not limited to arachidonic acid, oleic acid, eicosanoic acid, lauric acid, caprylic acid, capric acid, myristic acid, palmitic acid, stearic acid, linoleic acid, linolenic acid, dicaprate, tricaprate, monoolein, dilaurin, glyceryl 1-monocaprate, 1-dodecylazacycloheptan-2-one, an acylcarnitine, an acylcholine, or a C₁₋₂₀ alkyl ester (e.g., isopropylmyristate IPM), monoglyceride, diglyceride or pharmaceutically acceptable salt thereof). Topical formulations are described in detail in U.S. Pat. No. 6,747,014, which is incorporated herein by reference.

[0632] A. iRNA Formulations Comprising Membranous Molecular Assemblies

[0633] An iRNA for use in the compositions and methods of the invention can be formulated for delivery in a membranous molecular assembly, e.g., a liposome or a micelle. As used herein, the term “liposome” refers to a vesicle composed of amphiphilic lipids arranged in at least one bilayer, e.g., one bilayer or a plurality of bilayers. Liposomes include unilamellar and multilamellar vesicles that have a membrane formed from a lipophilic material and an aqueous interior. The aqueous portion contains the iRNA composition. The lipophilic material isolates the aqueous interior from an aqueous exterior, which typically does not include the iRNA composition, although in some examples, it may. Liposomes are useful for the transfer and delivery of active ingredients to the site of action. Because the liposomal membrane is structurally similar to biological membranes, when liposomes are applied to a tissue, the liposomal bilayer fuses with bilayer of the cellular membranes. As the merging of the liposome and cell progresses, the internal aqueous contents that include the iRNA are delivered into the cell where the iRNA can specifically bind to a target RNA and can mediate RNAi. In some cases the liposomes are also specifically targeted, e.g., to direct the iRNA to particular cell types.

[0634] A liposome containing a RNAi agent can be prepared by a variety of methods. In one example, the lipid component of a liposome is dissolved in a detergent so that micelles are formed with the lipid component. For example, the lipid component can be an amphipathic cationic lipid or lipid conjugate. The detergent can have a high critical micelle concentration and may be nonionic. Exemplary detergents include cholate, CHAPS, octylglucoside, deoxycholate, and lauroyl sarcosine. The RNAi agent preparation is then added to the micelles that include the lipid component. The cationic groups on the lipid interact with the RNAi agent and condense around the RNAi agent to form a liposome. After condensation, the detergent is removed, e.g., by dialysis, to yield a liposomal preparation of RNAi agent.

[0635] If necessary a carrier compound that assists in condensation can be added during the condensation reaction, e.g., by controlled addition. For example, the carrier compound can be a polymer other than a nucleic acid (e.g., spermine or spermidine). pH can also adjusted to favor condensation.

[0636] Methods for producing stable polynucleotide delivery vehicles, which incorporate a polynucleotide/cationic lipid complex as structural components of the delivery vehicle, are further described in, e.g., WO 96/37194, the entire contents of which are incorporated herein by reference. Liposome formation can also include one or more aspects of exemplary methods described in Felgner, P. L. et al., Proc. Natl. Acad. Sci., USA 8:7413-7417, 1987; U.S. Pat. No. 4,897,355; U.S. Pat. No. 5,171,678; Bangham, et al. M. Mol. Biol. 23:238, 1965; Olson, et al. Biochim. Biophys. Acta 557:9, 1979; Szoka, et al. Proc. Natl. Acad. Sci. 75: 4194, 1978; Mayhew, et al. Biochim. Biophys. Acta 775:169, 1984; Kim, et al. Biochim. Biophys. Acta 728:339, 1983; and Fukunaga, et al. Endocrinol. 115:757, 1984. Commonly used techniques for preparing lipid aggregates of appropriate size for use as delivery vehicles include sonication and freeze-thaw plus extrusion (see, e.g., Mayer, et al. Biochim. Biophys. Acta 858:161, 1986). Microfluidization can be used when consistently small (50 to 200 nm) and relatively uniform aggregates are desired (Mayhew, et al. Biochim. Biophys. Acta 775:169, 1984). These methods are readily adapted to packaging RNAi agent preparations into liposomes.

[0637] Liposomes fall into two broad classes. Cationic liposomes are positively charged liposomes which interact with the negatively charged nucleic acid molecules to form a stable complex. The positively charged nucleic acid/liposome complex binds to the negatively charged cell surface and is internalized in an endosome. Due to the acidic pH within the endosome, the liposomes are ruptured, releasing their contents into the cell cytoplasm (Wang et al., Biochem. Biophys. Res. Commun., 1987, 147, 980-985).

[0638] Liposomes which are pH-sensitive or negatively-charged, entrap nucleic acids rather than complex with it. Since both the nucleic acid and the lipid are similarly charged, repulsion rather than complex formation occurs. Nevertheless, some nucleic acid is entrapped within the aqueous interior of these liposomes. pH-sensitive liposomes have been used to deliver nucleic acids encoding the thymidine kinase gene to cell monolayers in culture. Expression of the exogenous gene was detected in the target cells (Zhou et al., Journal of Controlled Release, 1992, 19, 269-274).

[0639] One major type of liposomal composition includes phospholipids other than naturally-derived phosphatidylcholine. Neutral liposome compositions, for example, can be formed from dimyristoyl phosphatidylcholine (DMPC) or dipalmitoyl phosphatidylcholine (DPPC). Anionic liposome compositions generally are formed from dimyristoyl phosphatidylglycerol, while anionic fusogenic liposomes are formed primarily from dioleoyl phosphatidylethanolamine (DOPE). Another type of liposomal composition is formed from phosphatidylcholine (PC) such as, for example, soybean PC, and egg PC. Another type is formed from mixtures of phospholipid and/or phosphatidylcholine and/or cholesterol.

[0640] Examples of other methods to introduce liposomes into cells in vitro and in vivo include U.S. Pat. No. 5,283,185; U.S. Pat. No. 5,171,678; WO 94/00569; WO 93/24640; WO 91/16024; Felgner, J. Biol. Chem. 269:2550, 1994; Nabel, Proc. Natl. Acad. Sci. 90:11307, 1993; Nabel, Human Gene Ther. 3:649, 1992; Gershon, Biochem. 32:7143, 1993; and Strauss EMBO J. 11:417, 1992.

[0641] Non-ionic liposomal systems have also been examined to determine their utility in the delivery of drugs to the skin, in particular systems comprising non-ionic surfactant and cholesterol. Non-ionic liposomal formulations comprising Novasome™ I (glyceryl dilaurate/cholesterol/polyoxyethylene-10-stearyl ether) and Novasome™ II (glyceryl distearate/cholesterol/polyoxyethylene-10-stearyl ether) were used to deliver cyclosporin-A into the dermis of mouse skin. Results indicated that such non-ionic liposomal systems were effective in facilitating the deposition of cyclosporine A into different layers of the skin (Hu et al. S.T.P. Pharma. Sci., 1994, 4(6) 466).

[0642] Liposomes also include “sterically stabilized” liposomes, a term which, as used herein, refers to liposomes comprising one or more specialized lipids that, when incorporated into liposomes, result in enhanced circulation lifetimes relative to liposomes lacking such specialized lipids. Examples of sterically stabilized liposomes are those in which part of the vesicle-forming lipid portion of the liposome (A) comprises one or more glycolipids, such as monosialoganglioside G_{M1}, or (B) is derivatized with one or more hydrophilic polymers, such as a polyethylene glycol (PEG) moiety. While not wishing to be bound by any particular theory, it is thought in the art that, at least for sterically stabilized liposomes containing gangliosides, sphingomyelin, or PEG-derivatized lipids, the enhanced circulation half-life of these sterically stabilized liposomes derives from a reduced uptake into cells of the reticuloendothelial system (RES) (Allen et al., FEBS Letters, 1987, 223, 42; Wu et al., Cancer Research, 1993, 53, 3765).

[0643] Various liposomes comprising one or more glycolipids are known in the art. Papahadjopoulos et al. (Ann. N.Y. Acad. Sci., 1987, 507, 64) reported the ability of monosialoganglioside G_{M1}, galactocerebroside sulfate and phosphatidylinositol to improve blood half-lives of liposomes. These findings were expounded upon by Gabizon et al. (Proc. Natl. Acad. Sci. U.S.A., 1988, 85, 6949). U.S. Pat. No. 4,837,028 and WO 88/04924, both to Allen et al., disclose liposomes comprising (1) sphingomyelin and (2) the ganglioside G_{M1} or a galactocerebroside sulfate ester. U.S. Pat. No. 5,543,152 (Webb et al.) discloses liposomes comprising sphingomyelin. Liposomes comprising 1,2-sn-dimyristoylphosphatidylcholine are disclosed in WO 97/13499 (Lim et al).

[0644] In one embodiment, cationic liposomes are used. Cationic liposomes possess the advantage of being able to fuse to the cell membrane. Non-cationic liposomes, although not able to fuse as efficiently with the plasma membrane, are taken up by macrophages in vivo and can be used to deliver RNAi agents to macrophages.

[0645] Further advantages of liposomes include: liposomes obtained from natural phospholipids are biocompatible and biodegradable; liposomes can incorporate a wide range of water and lipid soluble drugs; liposomes can protect encapsulated RNAi agents in their internal compartments from metabolism and degradation (Rosoff, in “Pharmaceutical Dosage Forms,” Lieberman, Rieger and Banker (Eds.), 1988, volume 1, p. 245). Important considerations in the preparation of liposome formulations are the lipid surface charge, vesicle size and the aqueous volume of the liposomes.

[0646] A positively charged synthetic cationic lipid, N-[1-(2,3-dioleyloxy)propyl]-N,N,N-trimethylammonium chloride (DOTMA) can be used to form small liposomes that interact spontaneously with nucleic acid to form lipid-nucleic acid complexes which are capable of fusing with the negatively charged lipids of the cell membranes of tissue culture cells, resulting in delivery of RNAi agent (see, e.g., Felgner, P. L. et al., Proc. Natl. Acad. Sci., USA 8:7413-7417, 1987 and U.S. Pat. No. 4,897,355 for a description of DOTMA and its use with DNA).

[0647] A DOTMA analogue, 1,2-bis(oleoyloxy)-3-(trimethylammonia)propane (DOTAP) can be used in combination with a phospholipid to form DNA-complexing vesicles. Lipofectin™ Bethesda Research Laboratories, Gaithersburg, Md.) is an effective agent for the delivery of highly anionic nucleic acids into living tissue culture cells that comprise positively charged DOTMA liposomes which interact spontaneously with negatively charged polynucleotides to form complexes. When enough positively charged liposomes are used, the net charge on the resulting complexes is also positive. Positively charged complexes prepared in this way spontaneously attach to negatively charged cell surfaces, fuse with the plasma membrane, and efficiently deliver functional nucleic acids into, for example, tissue culture cells. Another commercially available cationic lipid, 1,2-bis(oleoyloxy)-3,3-(trimethylammonia)propane (“DOTAP”) (Boehringer Mannheim, Indianapolis, Ind.) differs from DOTMA in that the oleoyl moieties are linked by ester, rather than ether linkages.

[0648] Other reported cationic lipid compounds include those that have been conjugated to a variety of moieties including, for example, carboxyspermine which has been conjugated to one of two types of lipids and includes compounds such as 5-carboxyspermylglycine dioctaoleoylamide (“DOGS”) (Transfectam™, Promega, Madison, Wis.) and dipalmitoylphosphatidylethanolamine 5-carboxyspermyl-amide (“DPPES”) (see, e.g., U.S. Pat. No. 5,171,678).

[0649] Another cationic lipid conjugate includes derivatization of the lipid with cholesterol (“DC-Chol”) which has been formulated into liposomes in combination with DOPE (See, Gao, X. and Huang, L., Biochim. Biophys. Res. Commun. 179:280, 1991). Lipopolylysine, made by conjugating polylysine to DOPE, has been reported to be effective for transfection in the presence of serum (Zhou, X. et al., Biochim. Biophys. Acta 1065:8, 1991). For certain cell lines, these liposomes containing conjugated cationic lipids, are said to exhibit lower toxicity and provide more efficient transfection than the DOTMA-containing compositions. Other commercially available cationic lipid products include DMRIE and DMRIE-HP (Vical, La Jolla, Calif.) and Lipofectamine (DOSPA) (Life Technology, Inc., Gaithersburg, Md.). Other cationic lipids suitable for the delivery of oligonucleotides are described in WO 98/39359 and WO 96/37194.

[0650] Liposomal formulations are particularly suited for topical administration, liposomes present several advantages over other formulations. Such advantages include reduced side effects related to high systemic absorption of the administered drug, increased accumulation of the administered drug at the desired target, and the ability to administer RNAi agent into the skin. In some implementations, liposomes are used for delivering RNAi agent to epidermal cells and also to enhance the penetration of RNAi agent into dermal tissues, e.g., into skin. For example, the liposomes can be applied topically. Topical delivery of drugs formulated as liposomes to the skin has been documented (see, e.g., Weiner et al., Journal of Drug Targeting, 1992, vol. 2,405-410 and du Plessis et al., Antiviral Research, 18, 1992, 259-265; Mannino, R. J. and Fould-Fogerite, S., Biotechniques 6:682-690, 1988; Itani, T. et al. Gene 56:267-276. 1987; Nicolau, C. et al. Meth. Enz. 149:157-176, 1987; Straubinger, R. M. and Papahadjopoulos, D. Meth. Enz. 101:512-527, 1983; Wang, C. Y. and Huang, L., Proc. Natl. Acad. Sci. USA 84:7851-7855, 1987).

[0651] Non-ionic liposomal systems have also been examined to determine their utility in the delivery of drugs to the skin, in particular systems comprising non-ionic surfactant and cholesterol. Non-ionic liposomal formulations comprising Novasome I (glyceryl dilaurate/cholesterol/polyoxyethylene-10-stearyl ether) and Novasome II (glyceryl distearate/cholesterol/polyoxyethylene-10-stearyl ether) were used to deliver a drug into the dermis of mouse skin. Such formulations with RNAi agent are useful for treating a dermatological disorder.

[0652] Liposomes that include iRNA can be made highly deformable. Such deformability can enable the liposomes to penetrate through pore that are smaller than the average radius of the liposome. For example, transfersomes are a type of deformable liposomes. Transferosomes can be made by adding surface edge activators, usually surfactants, to a standard liposomal composition. Transfersomes that include RNAi agent can be delivered, for example, subcutaneously by infection in order to deliver RNAi agent to keratinocytes in the skin. In order to cross intact mammalian skin, lipid vesicles must pass through a series of fine pores, each with a diameter less than 50 nm, under the influence of a suitable transdermal gradient. In addition, due to the lipid properties, these transferosomes can be self-optimizing (adaptive to the shape of pores, e.g., in the skin), self-repairing, and can frequently reach their targets without fragmenting, and often self-loading.

[0653] Other formulations amenable to the present invention are described in U.S. provisional application Ser. No. 61/018,616, filed Jan. 2, 2008; 61/018,611, filed Jan. 2, 2008; 61/039,748, filed Mar. 26, 2008; 61/047,087, filed Apr. 22, 2008 and 61/051,528, filed May 8, 2008. PCT application no PCT/US2007/080331, filed Oct. 3, 2007 also describes formulations that are amenable to the present invention.

[0654] Transfersomes are yet another type of liposomes, and are highly deformable lipid aggregates which are attractive candidates for drug delivery vehicles. Transfersomes can be described as lipid droplets which are so highly deformable that they are easily able to penetrate through pores which are smaller than the droplet. Transfersomes are adaptable to the environment in which they are used, e.g., they are self-optimizing (adaptive to the shape of pores in the skin), self-repairing, frequently reach their targets without fragmenting, and often self-loading. To make transfersomes it is possible to add surface edge-activators, usually surfactants, to a standard liposomal composition. Transfersomes have been used to deliver serum albumin to the skin. The transfersome-mediated delivery of serum albumin has been shown to be as effective as subcutaneous injection of a solution containing serum albumin.

[0655] Surfactants find wide application in formulations such as emulsions (including microemulsions) and liposomes. The most common way of classifying and ranking the properties of the many different types of surfactants, both natural and synthetic, is by the use of the hydrophile/lipophile balance (HLB). The nature of the hydrophilic group (also known as the “head”) provides the most useful means for categorizing the different surfactants used in formulations (Rieger, in “Pharmaceutical Dosage Forms”, Marcel Dekker, Inc., New York, N.Y., 1988, p. 285).

[0656] If the surfactant molecule is not ionized, it is classified as a nonionic surfactant. Nonionic surfactants find wide application in pharmaceutical and cosmetic products and are usable over a wide range of pH values. In general their HLB values range from 2 to about 18 depending on their structure. Nonionic surfactants include nonionic esters such as ethylene glycol esters, propylene glycol esters, glyceryl esters, polyglyceryl esters, sorbitan esters, sucrose esters, and ethoxylated esters. Nonionic alkanolamides and ethers such as fatty alcohol ethoxylates, propoxylated alcohols, and ethoxylated/propoxylated block polymers are also included in this class. The polyoxyethylene surfactants are the most popular members of the nonionic surfactant class.

[0657] If the surfactant molecule carries a negative charge when it is dissolved or dispersed in water, the surfactant is classified as anionic. Anionic surfactants include carboxylates such as soaps, acyl lactylates, acyl amides of amino acids, esters of sulfuric acid such as alkyl sulfates and ethoxylated alkyl sulfates, sulfonates such as alkyl benzene sulfonates, acyl isethionates, acyl taurates and sulfosuccinates, and phosphates. The most important members of the anionic surfactant class are the alkyl sulfates and the soaps.

[0658] If the surfactant molecule carries a positive charge when it is dissolved or dispersed in water, the surfactant is classified as cationic. Cationic surfactants include quaternary ammonium salts and ethoxylated amines. The quaternary ammonium salts are the most used members of this class.

[0659] If the surfactant molecule has the ability to carry either a positive or negative charge, the surfactant is classified as amphoteric. Amphoteric surfactants include acrylic acid derivatives, substituted alkylamides, N-alkylbetaines and phosphatides.

[0660] The use of surfactants in drug products, formulations and in emulsions has been reviewed (Rieger, in “Pharmaceutical Dosage Forms”, Marcel Dekker, Inc., New York, N.Y., 1988, p. 285).

[0661] The iRNA for use in the methods of the invention can also be provided as micellar formulations. “Micelles” are defined herein as a particular type of molecular assembly in which amphipathic molecules are arranged in a spherical structure such that all the hydrophobic portions of the molecules are directed inward, leaving the hydrophilic portions in contact with the surrounding aqueous phase. The converse arrangement exists if the environment is hydrophobic.

[0662] A mixed micellar formulation suitable for delivery through transdermal membranes may be prepared by mixing an aqueous solution of the siRNA composition, an alkali metal C₈ to C₂₂ alkyl sulphate, and a micelle forming compounds. Exemplary micelle forming compounds include lecithin, hyaluronic acid, pharmaceutically acceptable salts of hyaluronic acid, glycolic acid, lactic acid, chamomile extract, cucumber extract, oleic acid, linoleic acid, linolenic acid, monoolein, monooleates, monolaurates, borage oil, evening of primrose oil, menthol, trihydroxy oxo cholanyl glycine and pharmaceutically acceptable salts thereof, glycerin, polyglycerin, lysine, polylysine, triolein, polyoxyethylene ethers and analogues thereof, polidocanol alkyl ethers and analogues thereof, chenodeoxycholate, deoxycholate, and mixtures thereof. The micelle forming compounds may be added at the same time or after addition of the alkali metal alkyl sulphate. Mixed micelles will form with substantially any kind of mixing of the ingredients but vigorous mixing in order to provide smaller size micelles.

[0663] In one method a first micellar composition is prepared which contains the siRNA composition and at least the alkali metal alkyl sulphate. The first micellar composition is then mixed with at least three micelle forming compounds to form a mixed micellar composition. In another method, the micellar composition is prepared by mixing the siRNA composition, the alkali metal alkyl sulphate and at least one of the micelle forming compounds, followed by addition of the remaining micelle forming compounds, with vigorous mixing.

[0664] Phenol and/or m-cresol may be added to the mixed micellar composition to stabilize the formulation and protect against bacterial growth. Alternatively, phenol and/or m-cresol may be added with the micelle forming ingredients. An isotonic agent such as glycerin may also be added after formation of the mixed micellar composition.

[0665] For delivery of the micellar formulation as a spray, the formulation can be put into an aerosol dispenser and the dispenser is charged with a propellant. The propellant, which is under pressure, is in liquid form in the dispenser. The ratios of the ingredients are adjusted so that the aqueous and propellant phases become one, i.e., there is one phase. If there are two phases, it is necessary to shake the dispenser prior to dispensing a portion of the contents, e.g., through a metered valve. The dispensed dose of pharmaceutical agent is propelled from the metered valve in a fine spray.

[0666] Propellants may include hydrogen-containing chlorofluorocarbons, hydrogen-containing fluorocarbons, dimethyl ether and diethyl ether. In certain embodiments, HFA 134a (1,1,1,2 tetrafluoroethane) may be used.

[0667] The specific concentrations of the essential ingredients can be determined by relatively straightforward experimentation. For absorption through the oral cavities, it is often desirable to increase, e.g., at least double or triple, the dosage for through injection or administration through the gastrointestinal tract.

[0668] B. Lipid Particles

[0669] iRNAs, e.g., dsRNAs of in the invention may be fully encapsulated in a lipid formulation, e.g., a LNP, or other nucleic acid-lipid particle.

[0670] As used herein, the term “LNP” refers to a stable nucleic acid-lipid particle. LNPs typically contain a cationic lipid, a non-cationic lipid, and a lipid that prevents aggregation of the particle (e.g., a PEG-lipid conjugate). LNPs are extremely useful for systemic applications, as they exhibit extended circulation lifetimes following intravenous (i.v.) injection and accumulate at distal sites (e.g., sites physically separated from the administration site). LNPs include “pSPLP,” which include an encapsulated condensing agent-nucleic acid complex as set forth in PCT Publication No. WO 00/03683. The particles of the present invention typically have a mean diameter of about 50 nm to about 150 nm, more typically about 60 nm to about 130 nm, more typically about 70 nm to about 110 nm, most typically about 70 nm to about 90 nm, and are substantially nontoxic. In addition, the nucleic acids when present in the nucleic acid-lipid particles of the present invention are resistant in aqueous solution to degradation with a nuclease. Nucleic acid-lipid particles and their method of preparation are disclosed in, e.g., U.S. Pat. Nos. 5,976,567; 5,981,501; 6,534,484; 6,586,410; 6,815,432; U.S. Publication No. 2010/0324120 and PCT Publication No. WO 96/40964.

[0671] In one embodiment, the lipid to drug ratio (mass/mass ratio) (e.g., lipid to dsRNA ratio) will be in the range of from about 1:1 to about 50:1, from about 1:1 to about 25:1, from about 3:1 to about 15:1, from about 4:1 to about 10:1, from about 5:1 to about 9:1, or about 6:1 to about 9:1. Ranges intermediate to the above recited ranges are also contemplated to be part of the invention.

[0672] The cationic lipid can be, for example, N,N-dioleyl-N,N-dimethylammonium chloride (DODAC), N,N-distearyl-N,N-dimethylammonium bromide (DDAB), N—(I-(2,3-dioleoyloxy)propyl)-N,N,N-trimethylammonium chloride (DOTAP), N—(I-(2,3-dioleyloxy)propyl)-N,N,N-trimethylammonium chloride (DOTMA), N,N-dimethyl-2,3-dioleyloxy)propylamine (DODMA), 1,2-DiLinoleyloxy-N,N-dimethylaminopropane (DLinDMA), 1,2-Dilinolenyloxy-N,N-dimethylaminopropane (DLenDMA), 1,2-Dilinoleylcarbamoyloxy-3-dimethylaminopropane (DLin-C-DAP), 1,2-Dilinoleyoxy-3-(dimethylamino)acetoxypropane (DLin-DAC), 1,2-Dilinoleyoxy-3-morpholinopropane (DLin-MA), 1,2-Dilinoleoyl-3-dimethylaminopropane (DLinDAP), 1,2-Dilinoleylthio-3-dimethylaminopropane (DLin-S-DMA), 1-Linoleoyl-2-linoleyloxy-3-dimethylaminopropane (DLin-2-DMAP), 1,2-Dilinoleyloxy-3-trimethylaminopropane chloride salt (DLin-TMA.Cl), 1,2-Dilinoleoyl-3-trimethylaminopropane chloride salt (DLin-TAP.Cl), 1,2-Dilinoleyloxy-3-(N-methylpiperazino)propane (DLin-MPZ), or 3-(N,N-Dilinoleylamino)-1,2-propanediol(DLinAP), 3-(N,N-Dioleylamino)-1,2-propanedio (DOAP), 1,2-Dilinoleyloxo-3-(2-N,N-dimethylamino)ethoxypropane (DLin-EG-DMA), 1,2-Dilinolenyloxy-N,N-dimethylaminopropane (DLinDMA), 2,2-Dilinoleyl-4-dimethylaminomethyl-[1,3]-dioxolane (DLin-K-DMA) or analogs thereof, (3aR,5s,6aS)—N,N-dimethyl-2,2-di((9Z,12Z)-octadeca-9,12-dienyl)tetrahydro-3aH-cyclopenta[d][1,3]dioxol-5-amine (ALN100), (6Z,9Z,28Z,31Z)-heptatriaconta-6,9,28,31-tetraen-19-yl 4-(dimethylamino)butanoate (MC3), 1,1′-(2-(4-(2-((2-(bis(2-hydroxydodecyl)amino)ethyl)(2-hydroxydodecyl)amino)ethyl)piperazin-1-yl)ethylazanediyl)didodecan-2-ol (Tech G1), or a mixture thereof. The cationic lipid can comprise from about 20 mol % to about 50 mol % or about 40 mol % of the total lipid present in the particle.

[0673] In another embodiment, the compound 2,2-Dilinoleyl-4-dimethylaminoethyl-[1,3]-dioxolane can be used to prepare lipid-siRNA nanoparticles. Synthesis of 2,2-Dilinoleyl-4-dimethylaminoethyl-[1,3]-dioxolane is described in U.S. provisional patent application No. 61/107,998 filed on Oct. 23, 2008, which is herein incorporated by reference.

[0674] In one embodiment, the lipid-siRNA particle includes 40% 2, 2-Dilinoleyl-4-dimethylaminoethyl-[1,3]-dioxolane: 10% DSPC: 40% Cholesterol: 10% PEG-C-DOMG (mole percent) with a particle size of 63.0±20 nm and a 0.027 siRNA/Lipid Ratio.

[0675] The ionizable/non-cationic lipid can be an anionic lipid or a neutral lipid including, but not limited to, distearoylphosphatidylcholine (DSPC), dioleoylphosphatidylcholine (DOPC), dipalmitoylphosphatidylcholine (DPPC), dioleoylphosphatidylglycerol (DOPG), dipalmitoylphosphatidylglycerol (DPPG), dioleoyl-phosphatidylethanolamine (DOPE), palmitoyloleoylphosphatidylcholine (POPC), palmitoyloleoylphosphatidylethanolamine (POPE), dioleoyl-phosphatidylethanolamine 4-(N-maleimidomethyl)-cyclohexane-1-carboxylate (DOPE-mal), dipalmitoyl phosphatidyl ethanolamine (DPPE), dimyristoylphosphoethanolamine (DMPE), distearoyl-phosphatidyl-ethanolamine (DSPE), 16-O-monomethyl PE, 16-O-dimethyl PE, 18-1-trans PE, 1-stearoyl-2-oleoyl-phosphatidyethanolamine (SOPE), cholesterol, or a mixture thereof. The non-cationic lipid can be from about 5 mol % to about 90 mol %, about 10 mol %, or about 58 mol % if cholesterol is included, of the total lipid present in the particle.

[0676] The conjugated lipid that inhibits aggregation of particles can be, for example, a polyethyleneglycol (PEG)-lipid including, without limitation, a PEG-diacylglycerol (DAG), a PEG-dialkyloxypropyl (DAA), a PEG-phospholipid, a PEG-ceramide (Cer), or a mixture thereof. The PEG-DAA conjugate can be, for example, a PEG-dilauryloxypropyl (Ci₂), a PEG-dimyristyloxypropyl (Ci₄), a PEG-dipalmityloxypropyl (Ci₆), or a PEG-distearyloxypropyl (C]₈). The conjugated lipid that prevents aggregation of particles can be from 0 mol % to about 20 mol % or about 2 mol % of the total lipid present in the particle.

[0677] In some embodiments, the nucleic acid-lipid particle further includes cholesterol at, e.g., about 10 mol % to about 60 mol % or about 48 mol % of the total lipid present in the particle.

[0678] In one embodiment, the lipidoid ND98.4HCl (MW 1487) (see U.S. patent application Ser. No. 12/056,230, filed Mar. 26, 2008, which is incorporated herein by reference), Cholesterol (Sigma-Aldrich), and PEG-Ceramide C16 (Avanti Polar Lipids) can be used to prepare lipid-dsRNA nanoparticles (i.e., LNP01 particles). Stock solutions of each in ethanol can be prepared as follows: ND98, 133 mg/ml; Cholesterol, 25 mg/ml, PEG-Ceramide C16, 100 mg/ml. The ND98, Cholesterol, and PEG-Ceramide C16 stock solutions can then be combined in a, e.g., 42:48:10 molar ratio. The combined lipid solution can be mixed with aqueous dsRNA (e.g., in sodium acetate pH 5) such that the final ethanol concentration is about 35-45% and the final sodium acetate concentration is about 100-300 mM. Lipid-dsRNA nanoparticles typically form spontaneously upon mixing. Depending on the desired particle size distribution, the resultant nanoparticle mixture can be extruded through a polycarbonate membrane (e.g., 100 nm cut-off) using, for example, a thermobarrel extruder, such as Lipex Extruder (Northern Lipids, Inc). In some cases, the extrusion step can be omitted. Ethanol removal and simultaneous buffer exchange can be accomplished by, for example, dialysis or tangential flow filtration. Buffer can be exchanged with, for example, phosphate buffered saline (PBS) at about pH 7, e.g., about pH 6.9, about pH 7.0, about pH 7.1, about pH 7.2, about pH 7.3, or about pH 7.4.

[chemical structure]

[0679] LNP01 formulations are described, e.g., in International Application Publication No. WO 2008/042973, which is hereby incorporated by reference.

[0680] Additional exemplary lipid-dsRNA formulations are described in Table 1.

TABLE 1

| | | cationic lipid/non-cationic lipid/ |
|---|---|---|
| | | cholesterol/PEG-lipid conjugate |
| | Ionizable/Cationic Lipid | Lipid:siRNA ratio |
| SNALP- | 1,2-Dilinolenyloxy-N,N-dimethylaminopropane | DLinDMA/DPPC/Cholesterol/ |
| 1 | (DLinDMA) | PEG-cDMA |
| | | (57.1/7.1/34.4/1.4) |
| | | lipid:siRNA~7:1 |
| 2-XTC | 2,2-Dilinoleyl-4-dimethylaminoethyl-[1,3]- | XTC/DPPC/Cholesterol/ |
| | dioxolane (XTC) | PEG-cDMA |
| | | 57.1/7.1/34.4/1.4 |
| | | lipid:siRNA~7:1 |
| LNP05 | 2,2-Dilinoleyl-4-dimethylaminoethyl-[1,3]- | XTC/DSPC/Cholesterol/ |
| | dioxolane (XTC) | PEG-DMG |
| | | 57.5/7.5/31.5/3.5 |
| | | lipid:siRNA~6:1 |
| LNP06 | 2,2-Dilinoleyl-4-dimethylaminoethyl-[1,3]- | XTC/DSPC/Cholesterol/ |
| | dioxolane (XTC) | PEG-DMG |
| | | 57.5/7.5/31.5/3.5 |
| | | lipid:siRNA~11:1 |
| LNP07 | 2,2-Dilinoleyl-4-dimethylaminoethyl-[1,3]- | XTC/DSPC/Cholesterol/ |
| | dioxolane (XTC) | PEG-DMG |
| | | 60/7.5/31/1.5, |
| | | lipid:siRNA~6:1 |
| LNP08 | 2,2-Dilinoleyl-4-dimethylaminoethyl-[1,3]- | XTC/DSPC/Cholesterol/ |
| | dioxolane (XTC) | PEG-DMG |
| | | 60/7.5/31/1.5, |
| | | lipid:siRNA~11:1 |
| LNP09 | 2,2-Dilinoleyl-4-dimethylaminoethyl-[1,3]- | XTC/DSPC/Cholesterol/ |
| | dioxolane (XTC) | PEG-DMG |
| | | 50/10/38.5/1.5 |
| | | Lipid:siRNA 10:1 |
| LNP10 | (3aR,5s,6aS)-N,N-dimethyl-2,2-di((9Z,12Z)- | ALN100/DSPC/Cholesterol/ |
| | octadeca-9,12-dienyl)tetrahydro-3aH- | PEG-DMG |
| | cyclopenta[d][1,3]dioxol-5-amine (ALN100) | 50/10/38.5/1.5 |
| | | Lipid:siRNA 10:1 |
| LNP11 | (6Z,9Z,28Z,31Z)-heptatriaconta-6,9,28,31- | MC-3/DSPC/Cholesterol/ |
| | tetraen-19-yl 4-(dimethylamino)butanoate | PEG-DMG |
| | (MC3) | 50/10/38.5/1.5 |
| | | Lipid:siRNA 10:1 |
| LNP12 | 1,1′-(2-(4-(2-((2-(bis(2- | Tech G1/DSPC/Cholesterol/ |
| | hydroxydodecyl)amino)ethyl)(2- | PEG-DMG |
| | hydroxydodecyl)amino)ethyl)piperazin-1- | 50/10/38.5/1.5 |
| | yl)ethylazanediyl)didodecan-2-ol (Tech G1) | Lipid:siRNA 10:1 |
| LNP13 | XTC | XTC/DSPC/Chol/PEG-DMG |
| | | 50/10/38.5/1.5 |
| | | Lipid:siRNA: 33:1 |
| LNP14 | MC3 | MC3/DSPC/Chol/PEG-DMG |
| | | 40/15/40/5 |
| | | Lipid:siRNA: 11:1 |
| LNP15 | MC3 | MC3/DSPC/Chol/PEG-DSG/ |
| | | GalNAc-PEG-DSG |
| | | 50/10/35/4.5/0.5 |
| | | Lipid:siRNA: 11:1 |
| LNP16 | MC3 | MC3/DSPC/Chol/PEG-DMG |
| | | 50/10/38.5/1.5 |
| | | Lipid:siRNA: 7:1 |
| LNP17 | MC3 | MC3/DSPC/Chol/PEG-DSG |
| | | 50/10/38.5/1.5 |
| | | Lipid: siRNA: 10:1 |
| LNP18 | MC3 | MC3/DSPC/Chol/PEG-DMG |
| | | 50/10/38.5/1.5 |
| | | Lipid: siRNA: 12:1 |
| LNP19 | MC3 | MC3/DSPC/Chol/PEG-DMG |
| | | 50/10/35/5 |
| | | Lipid: siRNA: 8:1 |
| LNP20 | MC3 | MC3/DSPC/Chol/PEG-DPG |
| | | 50/10/38.5/1.5 |
| | | Lipid: siRNA: 10:1 |
| LNP21 | C12-200 | C12-200/DSPC/Chol/PEG-DSG |
| | | 50/10/38.5/1.5 |
| | | Lipid: siRNA: 7:1 |
| LNP22 | XTC | XTC/DSPC/Chol/PEG-DSG |
| | | 50/10/38.5/1.5 |
| | | Lipid: siRNA: 10:1 |

DSPC: distearoylphosphatidylcholine
DPPC: dipalmitoylphosphatidylcholine
PEG-DMG: PEG-didimyristoyl glycerol (C14-PEG, or PEG-C14) (PEG with avg mol wt of 2000)
PEG-DSG: PEG-distyryl glycerol (C18-PEG, or PEG-C18) (PEG with avg mol wt of 2000)
PEG-cDMA: PEG-carbamoyl-1,2-dimyristyloxypropylamine (PEG with avg mol wt of 2000)
SNALP (1,2-Dilinolenyloxy-N,N-dimethylaminopropane (DLinDMA)) comprising formulations are described in International Publication No. WO2009/127060, filed Apr. 15, 2009, which is hereby incorporated by reference.

[0681] XTC comprising formulations are described, e.g., in U.S. Provisional Ser. No. 61/148,366, filed Jan. 29, 2009; U.S. Provisional Ser. No. 61/156,851, filed Mar. 2, 2009; U.S. Provisional Serial No. filed Jun. 10, 2009; U.S. Provisional Ser. No. 61/228,373, filed Jul. 24, 2009; U.S. Provisional Ser. No. 61/239,686, filed Sep. 3, 2009, and International Application No. PCT/US2010/022614, filed Jan. 29, 2010, which are hereby incorporated by reference.

[0682] MC3 comprising formulations are described, e.g., in U.S. Publication No. 2010/0324120, filed Jun. 10, 2010, the entire contents of which are hereby incorporated by reference.

[0683] ALNY-100 comprising formulations are described, e.g., International patent application number PCT/US09/63933, filed on Nov. 10, 2009, which is hereby incorporated by reference.

[0684] C12-200 comprising formulations are described in U.S. Provisional Ser. No. 61/175,770, filed May 5, 2009 and International Application No. PCT/US10/33777, filed May 5, 2010, which are hereby incorporated by reference.

### Synthesis of Ionizable/Cationic Lipids

[0685] Any of the compounds, e.g., cationic lipids and the like, used in the nucleic acid-lipid particles of the invention can be prepared by known organic synthesis techniques, including the methods described in more detail in the Examples. All substituents are as defined below unless indicated otherwise.

[0686] “Alkyl” means a straight chain or branched, noncyclic or cyclic, saturated aliphatic hydrocarbon containing from 1 to 24 carbon atoms. Representative saturated straight chain alkyls include methyl, ethyl, n-propyl, n-butyl, n-pentyl, n-hexyl, and the like; while saturated branched alkyls include isopropyl, sec-butyl, isobutyl, tert-butyl, isopentyl, and the like. Representative saturated cyclic alkyls include cyclopropyl, cyclobutyl, cyclopentyl, cyclohexyl, and the like; while unsaturated cyclic alkyls include cyclopentenyl and cyclohexenyl, and the like.

[0687] “Alkenyl” means an alkyl, as defined above, containing at least one double bond between adjacent carbon atoms. Alkenyls include both cis and trans isomers. Representative straight chain and branched alkenyls include ethylenyl, propylenyl, 1-butenyl, 2-butenyl, isobutylenyl, 1-pentenyl, 2-pentenyl, 3-methyl-1-butenyl, 2-methyl-2-butenyl, 2,3-dimethyl-2-butenyl, and the like.

[0688] “Alkynyl” means any alkyl or alkenyl, as defined above, which additionally contains at least one triple bond between adjacent carbons. Representative straight chain and branched alkynyls include acetylenyl, propynyl, 1-butynyl, 2-butynyl, 1-pentynyl, 2-pentynyl, 3-methyl-1 butynyl, and the like.

[0689] “Acyl” means any alkyl, alkenyl, or alkynyl wherein the carbon at the point of attachment is substituted with an oxo group, as defined below. For example, —C(═O)alkyl, —C(═O)alkenyl, and —C(═O)alkynyl are acyl groups.

[0690] “Heterocycle” means a 5- to 7-membered monocyclic, or 7- to 10-membered bicyclic, heterocyclic ring which is either saturated, unsaturated, or aromatic, and which contains from 1 or 2 heteroatoms independently selected from nitrogen, oxygen and sulfur, and wherein the nitrogen and sulfur heteroatoms can be optionally oxidized, and the nitrogen heteroatom can be optionally quaternized, including bicyclic rings in which any of the above heterocycles are fused to a benzene ring. The heterocycle can be attached via any heteroatom or carbon atom. Heterocycles include heteroaryls as defined below. Heterocycles include morpholinyl, pyrrolidinonyl, pyrrolidinyl, piperidinyl, piperizynyl, hydantoinyl, valerolactamyl, oxiranyl, oxetanyl, tetrahydrofuranyl, tetrahydropyranyl, tetrahydropyridinyl, tetrahydroprimidinyl, tetrahydrothiophenyl, tetrahydrothiopyranyl, tetrahydropyrimidinyl, tetrahydrothiophenyl, tetrahydrothiopyranyl, and the like.

[0691] The terms “optionally substituted alkyl”, “optionally substituted alkenyl”, “optionally substituted alkynyl”, “optionally substituted acyl”, and “optionally substituted heterocycle” means that, when substituted, at least one hydrogen atom is replaced with a substituent. In the case of an oxo substituent (═O) two hydrogen atoms are replaced. In this regard, substituents include oxo, halogen, heterocycle, —CN, —ORx, —NRxRy, —NRxC(═O)Ry, —NRxSO2Ry, —C(═O)Rx, —C(═O)ORx, —C(═O)NRxRy, —SOnRx and -SOnNRxRy, wherein n is 0, 1 or 2, Rx and Ry are the same or different and independently hydrogen, alkyl or heterocycle, and each of said alkyl and heterocycle substituents can be further substituted with one or more of oxo, halogen, —OH, —CN, alkyl, —ORx, heterocycle, —NRxRy, —NRxC(═O)Ry, —NRxSO2Ry, —C(═O)Rx, —C(═O)ORx, —C(═O)NRxRy, —SOnRx and -SOnNRxRy.

[0692] “Halogen” means fluoro, chloro, bromo and iodo.

[0693] In some embodiments, the methods of the invention can require the use of protecting groups. Protecting group methodology is well known to those skilled in the art (see, for example, Protective Groups in Organic Synthesis, Green, T. W. et al., Wiley-Interscience, New York City, 1999). Briefly, protecting groups within the context of this invention are any group that reduces or eliminates unwanted reactivity of a functional group. A protecting group can be added to a functional group to mask its reactivity during certain reactions and then removed to reveal the original functional group. In some embodiments an “alcohol protecting group” is used. An “alcohol protecting group” is any group which decreases or eliminates unwanted reactivity of an alcohol functional group. Protecting groups can be added and removed using techniques well known in the art.

### Synthesis of Formula A

[0694] In some embodiments, nucleic acid-lipid particles of the invention are formulated using a cationic lipid of formula A:

[chemical structure]

where R1 and R2 are independently alkyl, alkenyl or alkynyl, each can be optionally substituted, and R3 and R4 are independently lower alkyl or R3 and R4 can be taken together to form an optionally substituted heterocyclic ring. In some embodiments, the cationic lipid is XTC (2,2-Dilinoleyl-4-dimethylaminoethyl-[1,3]-dioxolane). In general, the lipid of formula A above can be made by the following Reaction Schemes 1 or 2, wherein all substituents are as defined above unless indicated otherwise.

[chemical structure]

Lipid A, where R1 and R2 are independently alkyl, alkenyl or alkynyl, each can be optionally substituted, and R3 and R4 are independently lower alkyl or R3 and R4 can be taken together to form an optionally substituted heterocyclic ring, can be prepared according to Scheme 1. Ketone 1 and bromide 2 can be purchased or prepared according to methods known to those of ordinary skill in the art. Reaction of 1 and 2 yields ketal 3. Treatment of ketal 3 with amine 4 yields lipids of formula A. The lipids of formula A can be converted to the corresponding ammonium salt with an organic salt of formula 5, where X is anion counter ion selected from halogen, hydroxide, phosphate, sulfate, or the like.

[chemical structure]

Alternatively, the ketone 1 starting material can be prepared according to Scheme 2. Grignard reagent 6 and cyanide 7 can be purchased or prepared according to methods known to those of ordinary skill in the art. Reaction of 6 and 7 yields ketone 1. Conversion of ketone 1 to the corresponding lipids of formula A is as described in Scheme 1.

### Synthesis of MC3

[0695] Preparation of DLin-M-C3-DMA (i.e., (6Z,9Z,28Z,31Z)-heptatriaconta-6,9,28,31-tetraen-19-yl 4-(dimethylamino)butanoate) was as follows. A solution of (6Z,9Z,28Z,31Z)-heptatriaconta-6,9,28,31-tetraen-19-ol (0.53 g), 4-N,N-dimethylaminobutyric acid hydrochloride (0.51 g), 4-N,N-dimethylaminopyridine (0.61 g) and 1-ethyl-3-(3-dimethylaminopropyl)carbodiimide hydrochloride (0.53 g) in dichloromethane (5 mL) was stirred at room temperature overnight. The solution was washed with dilute hydrochloric acid followed by dilute aqueous sodium bicarbonate. The organic fractions were dried over anhydrous magnesium sulphate, filtered and the solvent removed on a rotovap. The residue was passed down a silica gel column (20 g) using a 1-5% methanol/dichloromethane elution gradient. Fractions containing the purified product were combined and the solvent removed, yielding a colorless oil (0.54 g).

### Synthesis of ALNY-100

[0696] Synthesis of ketal 519 [ALNY-100] was performed using the following scheme 3:

[chemical structure]

### Synthesis of 515

[0697] To a stirred suspension of LiAlH4 (3.74 g, 0.09852 mol) in 200 ml anhydrous THF in a two neck RBF (1 L), was added a solution of 514 (10 g, 0.04926 mol) in 70 mL of THF slowly at 0° C. under nitrogen atmosphere. After complete addition, reaction mixture was warmed to room temperature and then heated to reflux for 4 h. Progress of the reaction was monitored by TLC. After completion of reaction (by TLC) the mixture was cooled to 0° C. and quenched with careful addition of saturated Na2SO4 solution. Reaction mixture was stirred for 4 h at room temperature and filtered off. Residue was washed well with THF. The filtrate and washings were mixed and diluted with 400 mL dioxane and 26 mL conc. HCl and stirred for 20 minutes at room temperature. The volatilities were stripped off under vacuum to furnish the hydrochloride salt of 515 as a white solid. Yield: 7.12 g 1H-NMR (DMSO, 400 MHz): δ=9.34 (broad, 2H), 5.68 (s, 2H), 3.74 (m, 1H), 2.66-2.60 (m, 2H), 2.50-2.45 (m, 5H).

### Synthesis of 516

[0698] To a stirred solution of compound 515 in 100 mL dry DCM in a 250 mL two neck RBF, was added NEt3 (37.2 mL, 0.2669 mol) and cooled to 0° C. under nitrogen atmosphere. After a slow addition of N-(benzyloxy-carbonyloxy)-succinimide (20 g, 0.08007 mol) in 50 mL dry DCM, reaction mixture was allowed to warm to room temperature. After completion of the reaction (2-3 h by TLC) mixture was washed successively with 1N HCl solution (1×100 mL) and saturated NaHCO3 solution (1×50 mL). The organic layer was then dried over anhyd. Na2SO4 and the solvent was evaporated to give crude material which was purified by silica gel column chromatography to get 516 as sticky mass. Yield: 11 g (89%). 1H-NMR (CDCl3, 400 MHz): δ=7.36-7.27 (m, 5H), 5.69 (s, 2H), 5.12 (s, 2H), 4.96 (br., 1H) 2.74 (s, 3H), 2.60 (m, 2H), 2.30-2.25 (m, 2H). LC-MS [M+H] −232.3 (96.94%).

### Synthesis of 517A and 517B

[0699] The cyclopentene 516 (5 g, 0.02164 mol) was dissolved in a solution of 220 mL acetone and water (10:1) in a single neck 500 mL RBF and to it was added N-methyl morpholine-N-oxide (7.6 g, 0.06492 mol) followed by 4.2 mL of 7.6% solution of OsO4 (0.275 g, 0.00108 mol) in tert-butanol at room temperature. After completion of the reaction (˜3 h), the mixture was quenched with addition of solid Na2SO3 and resulting mixture was stirred for 1.5 h at room temperature. Reaction mixture was diluted with DCM (300 mL) and washed with water (2×100 mL) followed by saturated NaHCO3 (1×50 mL) solution, water (1×30 mL) and finally with brine (1×50 mL). Organic phase was dried over an. Na2SO4 and solvent was removed in vacuum. Silica gel column chromatographic purification of the crude material was afforded a mixture of diastereomers, which were separated by prep HPLC. Yield: −6 g crude

[0700] 517A—Peak-1 (white solid), 5.13 g (96%). 1H-NMR (DMSO, 400 MHz): δ=7.39-7.31 (m, 5H), 5.04 (s, 2H), 4.78-4.73 (m, 1H), 4.48-4.47 (d, 2H), 3.94-3.93 (m, 2H), 2.71 (s, 3H), 1.72-1.67 (m, 4H). LC-MS−[M+H] −266.3, [M+NH4+] −283.5 present, HPLC −97.86%. Stereochemistry confirmed by X-ray.

### Synthesis of 518

[0701] Using a procedure analogous to that described for the synthesis of compound 505, compound 518 (1.2 g, 41%) was obtained as a colorless oil. 1H-NMR (CDCl3, 400 MHz): δ=7.35-7.33 (m, 4H), 7.30-7.27 (m, 1H), 5.37-5.27 (m, 8H), 5.12 (s, 2H), 4.75 (m, 1H), 4.58-4.57 (m, 2H), 2.78-2.74 (m, 7H), 2.06-2.00 (m, 8H), 1.96-1.91 (m, 2H), 1.62 (m, 4H), 1.48 (m, 2H), 1.37-1.25 (br m, 36H), 0.87 (m, 6H). HPLC −98.65%.

### General Procedure for the Synthesis of Compound 519

[0702] A solution of compound 518 (1 eq) in hexane (15 mL) was added in a drop-wise fashion to an ice-cold solution of LAH in THF (1 M, 2 eq). After complete addition, the mixture was heated at 40° C. over 0.5 h then cooled again on an ice bath. The mixture was carefully hydrolyzed with saturated aqueous Na2SO4 then filtered through celite and reduced to an oil. Column chromatography provided the pure 519 (1.3 g, 68%) which was obtained as a colorless oil. 13C NMR S=130.2, 130.1 (×2), 127.9 (×3), 112.3, 79.3, 64.4, 44.7, 38.3, 35.4, 31.5, 29.9 (×2), 29.7, 29.6 (×2), 29.5 (×3), 29.3 (×2), 27.2 (×3), 25.6, 24.5, 23.3, 226, 14.1; Electrospray MS (+ve): Molecular weight for C44H80NO2 (M+H)+Calc. 654.6. Found 654.6.

[0703] Formulations prepared by either the standard or extrusion-free method can be characterized in similar manners. For example, formulations are typically characterized by visual inspection. They should be whitish translucent solutions free from aggregates or sediment. Particle size and particle size distribution of lipid-nanoparticles can be measured by light scattering using, for example, a Malvern Zetasizer Nano ZS (Malvern, USA). Particles should be about 20-300 nm, such as 40-100 nm in size. The particle size distribution should be unimodal. The total dsRNA concentration in the formulation, as well as the entrapped fraction, is estimated using a dye exclusion assay. A sample of the formulated dsRNA can be incubated with an RNA-binding dye, such as Ribogreen (Molecular Probes) in the presence or absence of a formulation disrupting surfactant, e.g., 0.5% Triton-X100. The total dsRNA in the formulation can be determined by the signal from the sample containing the surfactant, relative to a standard curve. The entrapped fraction is determined by subtracting the “free” dsRNA content (as measured by the signal in the absence of surfactant) from the total dsRNA content. Percent entrapped dsRNA is typically >85%. For SNALP formulation, the particle size is at least 30 nm, at least 40 nm, at least 50 nm, at least 60 nm, at least 70 nm, at least 80 nm, at least 90 nm, at least 100 nm, at least 110 nm, and at least 120 nm. The suitable range is typically about at least 50 nm to about at least 110 nm, about at least 60 nm to about at least 100 nm, or about at least 80 nm to about at least 90 nm.

[0704] Compositions and formulations for oral administration include powders or granules, microparticulates, nanoparticulates, suspensions or solutions in water or non-aqueous media, capsules, gel capsules, sachets, tablets or minitablets. Thickeners, flavoring agents, diluents, emulsifiers, dispersing aids or binders can be desirable. In some embodiments, oral formulations are those in which dsRNAs featured in the invention are administered in conjunction with one or more penetration enhancer surfactants and chelators. Suitable surfactants include fatty acids and/or esters or salts thereof, bile acids and/or salts thereof. Suitable bile acids/salts include chenodeoxycholic acid (CDCA) and ursodeoxychenodeoxycholic acid (UDCA), cholic acid, dehydrocholic acid, deoxycholic acid, glucholic acid, glycholic acid, glycodeoxycholic acid, taurocholic acid, taurodeoxycholic acid, sodium tauro-24,25-dihydro-fusidate and sodium glycodihydrofusidate. Suitable fatty acids include arachidonic acid, undecanoic acid, oleic acid, lauric acid, caprylic acid, capric acid, myristic acid, palmitic acid, stearic acid, linoleic acid, linolenic acid, dicaprate, tricaprate, monoolein, dilaurin, glyceryl 1-monocaprate, 1-dodecylazacycloheptan-2-one, an acylcarnitine, an acylcholine, or a monoglyceride, a diglyceride or a pharmaceutically acceptable salt thereof (e.g., sodium). In some embodiments, combinations of penetration enhancers are used, for example, fatty acids/salts in combination with bile acids/salts. One exemplary combination is the sodium salt of lauric acid, capric acid and UDCA. Further penetration enhancers include polyoxyethylene-9-lauryl ether, polyoxyethylene-20-cetyl ether. DsRNAs featured in the invention can be delivered orally, in granular form including sprayed dried particles, or complexed to form micro or nanoparticles. DsRNA complexing agents include poly-amino acids; polyimines; polyacrylates; polyalkylacrylates, polyoxethanes, polyalkylcyanoacrylates; cationized gelatins, albumins, starches, acrylates, polyethyleneglycols (PEG) and starches; polyalkylcyanoacrylates; DEAE-derivatized polyimines, pollulans, celluloses and starches. Suitable complexing agents include chitosan, N-trimethylchitosan, poly-L-lysine, polyhistidine, polyornithine, polyspermines, protamine, polyvinylpyridine, polythiodiethylaminomethylethylene P(TDAE), polyaminostyrene (e.g., p-amino), poly(methylcyanoacrylate), poly(ethylcyanoacrylate), poly(butylcyanoacrylate), poly(isobutylcyanoacrylate), poly(isohexylcynaoacrylate), DEAE-methacrylate, DEAE-hexylacrylate, DEAE-acrylamide, DEAE-albumin and DEAE-dextran, polymethylacrylate, polyhexylacrylate, poly(D,L-lactic acid), poly(DL-lactic-co-glycolic acid (PLGA), alginate, and polyethyleneglycol (PEG). Oral formulations for dsRNAs and their preparation are described in detail in U.S. Pat. No. 6,887,906, US Publn. No. 20030027780, and U.S. Pat. No. 6,747,014, each of which is incorporated herein by reference.

[0705] Compositions and formulations for parenteral, intraparenchymal (into the brain), intrathecal, intraventricular or intrahepatic administration can include sterile aqueous solutions which can also contain buffers, diluents and other suitable additives such as, but not limited to, penetration enhancers, carrier compounds and other pharmaceutically acceptable carriers or excipients.

[0706] Pharmaceutical compositions of the present invention include, but are not limited to, solutions, emulsions, and liposome-containing formulations. These compositions can be generated from a variety of components that include, but are not limited to, preformed liquids, self-emulsifying solids and self-emulsifying semisolids. Particularly preferred are formulations that target the liver when treating hepatic disorders such as hepatic carcinoma.

[0707] The pharmaceutical formulations of the present invention, which can conveniently be presented in unit dosage form, can be prepared according to conventional techniques well known in the pharmaceutical industry. Such techniques include the step of bringing into association the active ingredients with the pharmaceutical carrier(s) or excipient(s). In general, the formulations are prepared by uniformly and intimately bringing into association the active ingredients with liquid carriers or finely divided solid carriers or both, and then, if necessary, shaping the product.

[0708] The compositions of the present invention can be formulated into any of many possible dosage forms such as, but not limited to, tablets, capsules, gel capsules, liquid syrups, soft gels, suppositories, and enemas. The compositions of the present invention can also be formulated as suspensions in aqueous, non-aqueous or mixed media. Aqueous suspensions can further contain substances which increase the viscosity of the suspension including, for example, sodium carboxymethylcellulose, sorbitol and/or dextran. The suspension can also contain stabilizers.

[0709] C. Additional Formulations

[0710] i. Emulsions

[0711] The compositions of the present invention can be prepared and formulated as emulsions. Emulsions are typically heterogeneous systems of one liquid dispersed in another in the form of droplets usually exceeding 0.1 μm in diameter (see e.g., Ansel's Pharmaceutical Dosage Forms and Drug Delivery Systems, Allen, L V., Popovich N G., and Ansel H C., 2004, Lippincott Williams & Wilkins (8th ed.), New York, N.Y.; Idson, in Pharmaceutical Dosage Forms, Lieberman, Rieger and Banker (Eds.), 1988, Marcel Dekker, Inc., New York, N.Y., volume 1, p. 199; Rosoff, in Pharmaceutical Dosage Forms, Lieberman, Rieger and Banker (Eds.), 1988, Marcel Dekker, Inc., New York, N.Y., Volume 1, p. 245; Block in Pharmaceutical Dosage Forms, Lieberman, Rieger and Banker (Eds.), 1988, Marcel Dekker, Inc., New York, N.Y., volume 2, p. 335; Higuchi et al., in Remington's Pharmaceutical Sciences, Mack Publishing Co., Easton, Pa., 1985, p. 301). Emulsions are often biphasic systems comprising two immiscible liquid phases intimately mixed and dispersed with each other. In general, emulsions can be of either the water-in-oil (w/o) or the oil-in-water (o/w) variety. When an aqueous phase is finely divided into and dispersed as minute droplets into a bulk oily phase, the resulting composition is called a water-in-oil (w/o) emulsion. Alternatively, when an oily phase is finely divided into and dispersed as minute droplets into a bulk aqueous phase, the resulting composition is called an oil-in-water (o/w) emulsion. Emulsions can contain additional components in addition to the dispersed phases, and the active drug which can be present as a solution in either the aqueous phase, oily phase or itself as a separate phase. Pharmaceutical excipients such as emulsifiers, stabilizers, dyes, and anti-oxidants can also be present in emulsions as needed. Pharmaceutical emulsions can also be multiple emulsions that are comprised of more than two phases such as, for example, in the case of oil-in-water-in-oil (o/w/o) and water-in-oil-in-water (w/o/w) emulsions. Such complex formulations often provide certain advantages that simple binary emulsions do not. Multiple emulsions in which individual oil droplets of an o/w emulsion enclose small water droplets constitute a w/o/w emulsion. Likewise a system of oil droplets enclosed in globules of water stabilized in an oily continuous phase provides an o/w/o emulsion.

[0712] Emulsions are characterized by little or no thermodynamic stability. Often, the dispersed or discontinuous phase of the emulsion is well dispersed into the external or continuous phase and maintained in this form through the means of emulsifiers or the viscosity of the formulation. Either of the phases of the emulsion can be a semisolid or a solid, as is the case of emulsion-style ointment bases and creams. Other means of stabilizing emulsions entail the use of emulsifiers that can be incorporated into either phase of the emulsion. Emulsifiers can broadly be classified into four categories: synthetic surfactants, naturally occurring emulsifiers, absorption bases, and finely dispersed solids (see e.g., Ansel's Pharmaceutical Dosage Forms and Drug Delivery Systems, Allen, L V., Popovich N G., and Ansel H C., 2004, Lippincott Williams & Wilkins (8th ed.), New York, N.Y.; Idson, in Pharmaceutical Dosage Forms, Lieberman, Rieger and Banker (Eds.), 1988, Marcel Dekker, Inc., New York, N.Y., volume 1, p. 199).

[0713] Synthetic surfactants, also known as surface active agents, have found wide applicability in the formulation of emulsions and have been reviewed in the literature (see e.g., Ansel's Pharmaceutical Dosage Forms and Drug Delivery Systems, Allen, L V., Popovich N G., and Ansel H C., 2004, Lippincott Williams & Wilkins (8th ed.), New York, N.Y.; Rieger, in Pharmaceutical Dosage Forms, Lieberman, Rieger and Banker (Eds.), 1988, Marcel Dekker, Inc., New York, N.Y., volume 1, p. 285; Idson, in Pharmaceutical Dosage Forms, Lieberman, Rieger and Banker (Eds.), Marcel Dekker, Inc., New York, N.Y., 1988, volume 1, p. 199). Surfactants are typically amphiphilic and comprise a hydrophilic and a hydrophobic portion. The ratio of the hydrophilic to the hydrophobic nature of the surfactant has been termed the hydrophile/lipophile balance (HLB) and is a valuable tool in categorizing and selecting surfactants in the preparation of formulations. Surfactants can be classified into different classes based on the nature of the hydrophilic group: nonionic, anionic, cationic and amphoteric (see e.g., Ansel's Pharmaceutical Dosage Forms and Drug Delivery Systems, Allen, L V., Popovich N G., and Ansel H C., 2004, Lippincott Williams & Wilkins (8th ed.), New York, N.Y. Rieger, in Pharmaceutical Dosage Forms, Lieberman, Rieger and Banker (Eds.), 1988, Marcel Dekker, Inc., New York, N.Y., volume 1, p. 285).

[0714] Naturally occurring emulsifiers used in emulsion formulations include lanolin, beeswax, phosphatides, lecithin and acacia. Absorption bases possess hydrophilic properties such that they can soak up water to form w/o emulsions yet retain their semisolid consistencies, such as anhydrous lanolin and hydrophilic petrolatum. Finely divided solids have also been used as good emulsifiers especially in combination with surfactants and in viscous preparations. These include polar inorganic solids, such as heavy metal hydroxides, nonswelling clays such as bentonite, attapulgite, hectorite, kaolin, montmorillonite, colloidal aluminum silicate and colloidal magnesium aluminum silicate, pigments and nonpolar solids such as carbon or glyceryl tristearate.

[0715] A large variety of non-emulsifying materials are also included in emulsion formulations and contribute to the properties of emulsions. These include fats, oils, waxes, fatty acids, fatty alcohols, fatty esters, humectants, hydrophilic colloids, preservatives and antioxidants (Block, in Pharmaceutical Dosage Forms, Lieberman, Rieger and Banker (Eds.), 1988, Marcel Dekker, Inc., New York, N.Y., volume 1, p. 335; Idson, in Pharmaceutical Dosage Forms, Lieberman, Rieger and Banker (Eds.), 1988, Marcel Dekker, Inc., New York, N.Y., volume 1, p. 199).

[0716] Hydrophilic colloids or hydrocolloids include naturally occurring gums and synthetic polymers such as polysaccharides (for example, acacia, agar, alginic acid, carrageenan, guar gum, karaya gum, and tragacanth), cellulose derivatives (for example, carboxymethylcellulose and carboxypropylcellulose), and synthetic polymers (for example, carbomers, cellulose ethers, and carboxyvinyl polymers). These disperse or swell in water to form colloidal solutions that stabilize emulsions by forming strong interfacial films around the dispersed-phase droplets and by increasing the viscosity of the external phase.

[0717] Since emulsions often contain a number of ingredients such as carbohydrates, proteins, sterols and phosphatides that can readily support the growth of microbes, these formulations often incorporate preservatives. Commonly used preservatives included in emulsion formulations include methyl paraben, propyl paraben, quaternary ammonium salts, benzalkonium chloride, esters of p-hydroxybenzoic acid, and boric acid. Antioxidants are also commonly added to emulsion formulations to prevent deterioration of the formulation. Antioxidants used can be free radical scavengers such as tocopherols, alkyl gallates, butylated hydroxyanisole, butylated hydroxytoluene, or reducing agents such as ascorbic acid and sodium metabisulfite, and antioxidant synergists such as citric acid, tartaric acid, and lecithin.

[0718] The application of emulsion formulations via dermatological, oral and parenteral routes and methods for their manufacture have been reviewed in the literature (see e.g., Ansel's Pharmaceutical Dosage Forms and Drug Delivery Systems, Allen, L V., Popovich N G., and Ansel H C., 2004, Lippincott Williams & Wilkins (8th ed.), New York, N.Y.; Idson, in Pharmaceutical Dosage Forms, Lieberman, Rieger and Banker (Eds.), 1988, Marcel Dekker, Inc., New York, N.Y., volume 1, p. 199). Emulsion formulations for oral delivery have been very widely used because of ease of formulation, as well as efficacy from an absorption and bioavailability standpoint (see e.g., Ansel's Pharmaceutical Dosage Forms and Drug Delivery Systems, Allen, L V., Popovich N G., and Ansel H C., 2004, Lippincott Williams & Wilkins (8th ed.), New York, N.Y.; Rosoff, in Pharmaceutical Dosage Forms, Lieberman, Rieger and Banker (Eds.), 1988, Marcel Dekker, Inc., New York, N.Y., volume 1, p. 245; Idson, in Pharmaceutical Dosage Forms, Lieberman, Rieger and Banker (Eds.), 1988, Marcel Dekker, Inc., New York, N.Y., volume 1, p. 199). Mineral-oil base laxatives, oil-soluble vitamins and high fat nutritive preparations are among the materials that have commonly been administered orally as o/w emulsions.

[0719] ii. Microemulsions

[0720] In one embodiment of the present invention, the compositions of iRNAs and nucleic acids are formulated as microemulsions. A microemulsion can be defined as a system of water, oil and amphiphile which is a single optically isotropic and thermodynamically stable liquid solution (see e.g., Ansel's Pharmaceutical Dosage Forms and Drug Delivery Systems, Allen, L V., Popovich N G., and Ansel H C., 2004, Lippincott Williams & Wilkins (8th ed.), New York, NY; Rosoff, in Pharmaceutical Dosage Forms, Lieberman, Rieger and Banker (Eds.), 1988, Marcel Dekker, Inc., New York, N.Y., volume 1, p. 245). Typically microemulsions are systems that are prepared by first dispersing an oil in an aqueous surfactant solution and then adding a sufficient amount of a fourth component, generally an intermediate chain-length alcohol to form a transparent system. Therefore, microemulsions have also been described as thermodynamically stable, isotropically clear dispersions of two immiscible liquids that are stabilized by interfacial films of surface-active molecules (Leung and Shah, in: Controlled Release of Drugs: Polymers and Aggregate Systems, Rosoff, M., Ed., 1989, VCH Publishers, New York, pages 185-215). Microemulsions commonly are prepared via a combination of three to five components that include oil, water, surfactant, cosurfactant and electrolyte. Whether the microemulsion is of the water-in-oil (w/o) or an oil-in-water (o/w) type is dependent on the properties of the oil and surfactant used and on the structure and geometric packing of the polar heads and hydrocarbon tails of the surfactant molecules (Schott, in Remington's Pharmaceutical Sciences, Mack Publishing Co., Easton, Pa., 1985, p. 271).

[0721] The phenomenological approach utilizing phase diagrams has been extensively studied and has yielded a comprehensive knowledge, to one skilled in the art, of how to formulate microemulsions (see e.g., Ansel's Pharmaceutical Dosage Forms and Drug Delivery Systems, Allen, L V., Popovich N G., and Ansel H C., 2004, Lippincott Williams & Wilkins (8th ed.), New York, N.Y.; Rosoff, in Pharmaceutical Dosage Forms, Lieberman, Rieger and Banker (Eds.), 1988, Marcel Dekker, Inc., New York, N.Y., volume 1, p. 245; Block, in Pharmaceutical Dosage Forms, Lieberman, Rieger and Banker (Eds.), 1988, Marcel Dekker, Inc., New York, N.Y., volume 1, p. 335). Compared to conventional emulsions, microemulsions offer the advantage of solubilizing water-insoluble drugs in a formulation of thermodynamically stable droplets that are formed spontaneously.

[0722] Surfactants used in the preparation of microemulsions include, but are not limited to, ionic surfactants, non-ionic surfactants, Brij 96, polyoxyethylene oleyl ethers, polyglycerol fatty acid esters, tetraglycerol monolaurate (ML310), tetraglycerol monooleate (MO310), hexaglycerol monooleate (PO310), hexaglycerol pentaoleate (PO500), decaglycerol monocaprate (MCA750), decaglycerol monooleate (MO750), decaglycerol sequioleate (SO750), decaglycerol decaoleate (DAO750), alone or in combination with cosurfactants. The cosurfactant, usually a short-chain alcohol such as ethanol, 1-propanol, and 1-butanol, serves to increase the interfacial fluidity by penetrating into the surfactant film and consequently creating a disordered film because of the void space generated among surfactant molecules. Microemulsions can, however, be prepared without the use of cosurfactants and alcohol-free self-emulsifying microemulsion systems are known in the art. The aqueous phase can typically be, but is not limited to, water, an aqueous solution of the drug, glycerol, PEG300, PEG400, polyglycerols, propylene glycols, and derivatives of ethylene glycol. The oil phase can include, but is not limited to, materials such as Captex 300, Captex 355, Capmul MCM, fatty acid esters, medium chain (C8-C12) mono, di, and tri-glycerides, polyoxyethylated glyceryl fatty acid esters, fatty alcohols, polyglycolized glycerides, saturated polyglycolized C8-C10 glycerides, vegetable oils and silicone oil.

[0723] Microemulsions are particularly of interest from the standpoint of drug solubilization and the enhanced absorption of drugs. Lipid based microemulsions (both o/w and w/o) have been proposed to enhance the oral bioavailability of drugs, including peptides (see e.g., U.S. Pat. Nos. 6,191,105; 7,063,860; 7,070,802; 7,157,099; Constantinides et al., Pharmaceutical Research, 1994, 11, 1385-1390; Ritschel, Meth. Find. Exp. Clin. Pharmacol., 1993, 13, 205). Microemulsions afford advantages of improved drug solubilization, protection of drug from enzymatic hydrolysis, possible enhancement of drug absorption due to surfactant-induced alterations in membrane fluidity and permeability, ease of preparation, ease of oral administration over solid dosage forms, improved clinical potency, and decreased toxicity (see e.g., U.S. Pat. Nos. 6,191,105; 7,063,860; 7,070,802; 7,157,099; Constantinides et al., Pharmaceutical Research, 1994, 11, 1385; Ho et al., J. Pharm. Sci., 1996, 85, 138-143). Often microemulsions can form spontaneously when their components are brought together at ambient temperature. This can be particularly advantageous when formulating thermolabile drugs, peptides or iRNAs. Microemulsions have also been effective in the transdermal delivery of active components in both cosmetic and pharmaceutical applications. It is expected that the microemulsion compositions and formulations of the present invention will facilitate the increased systemic absorption of iRNAs and nucleic acids from the gastrointestinal tract, as well as improve the local cellular uptake of iRNAs and nucleic acids.

[0724] Microemulsions of the present invention can also contain additional components and additives such as sorbitan monostearate (Grill 3), Labrasol, and penetration enhancers to improve the properties of the formulation and to enhance the absorption of the iRNAs and nucleic acids of the present invention. Penetration enhancers used in the microemulsions of the present invention can be classified as belonging to one of five broad categories—surfactants, fatty acids, bile salts, chelating agents, and non-chelating non-surfactants (Lee et al., Critical Reviews in Therapeutic Drug Carrier Systems, 1991, p. 92). Each of these classes has been discussed above.

[0725] iii. Microparticles

[0726] an RNAi agent of the invention may be incorporated into a particle, e.g., a microparticle. Microparticles can be produced by spray-drying, but may also be produced by other methods including lyophilization, evaporation, fluid bed drying, vacuum drying, or a combination of these techniques.

[0727] iv. Penetration Enhancers

[0728] In one embodiment, the present invention employs various penetration enhancers to effect the efficient delivery of nucleic acids, particularly iRNAs, to the skin of animals. Most drugs are present in solution in both ionized and nonionized forms. However, usually only lipid soluble or lipophilic drugs readily cross cell membranes. It has been discovered that even non-lipophilic drugs can cross cell membranes if the membrane to be crossed is treated with a penetration enhancer. In addition to aiding the diffusion of non-lipophilic drugs across cell membranes, penetration enhancers also enhance the permeability of lipophilic drugs.

[0729] Penetration enhancers can be classified as belonging to one of five broad categories, i.e., surfactants, fatty acids, bile salts, chelating agents, and non-chelating non-surfactants (see e.g., Malmsten, M. Surfactants and polymers in drug delivery, Informa Health Care, New York, N.Y., 2002; Lee et al., Critical Reviews in Therapeutic Drug Carrier Systems, 1991, p. 92). Each of the above mentioned classes of penetration enhancers are described below in greater detail.

[0730] Surfactants (or “surface-active agents”) are chemical entities which, when dissolved in an aqueous solution, reduce the surface tension of the solution or the interfacial tension between the aqueous solution and another liquid, with the result that absorption of iRNAs through the mucosa is enhanced. In addition to bile salts and fatty acids, these penetration enhancers include, for example, sodium lauryl sulfate, polyoxyethylene-9-lauryl ether and polyoxyethylene-20-cetyl ether) (see e.g., Malmsten, M. Surfactants and polymers in drug delivery, Informa Health Care, New York, N.Y., 2002; Lee et al., Critical Reviews in Therapeutic Drug Carrier Systems, 1991, p. 92); and perfluorochemical emulsions, such as FC-43. Takahashi et al., J. Pharm. Pharmacol., 1988, 40, 252).

[0731] Various fatty acids and their derivatives which act as penetration enhancers include, for example, oleic acid, lauric acid, capric acid (n-decanoic acid), myristic acid, palmitic acid, stearic acid, linoleic acid, linolenic acid, dicaprate, tricaprate, monoolein (1-monooleoyl-rac-glycerol), dilaurin, caprylic acid, arachidonic acid, glycerol 1-monocaprate, 1-dodecylazacycloheptan-2-one, acylcarnitines, acylcholines, C₁₋₂₀ alkyl esters thereof (e.g., methyl, isopropyl and t-butyl), and mono- and di-glycerides thereof (i.e., oleate, laurate, caprate, myristate, palmitate, stearate, linoleate, etc.) (see e.g., Touitou, E., et al. Enhancement in Drug Delivery, CRC Press, Danvers, Mass., 2006; Lee et al., Critical Reviews in Therapeutic Drug Carrier Systems, 1991, p. 92; Muranishi, Critical Reviews in Therapeutic Drug Carrier Systems, 1990, 7, 1-33; El Hariri et al., J. Pharm. Pharmacol., 1992, 44, 651-654).

[0732] The physiological role of bile includes the facilitation of dispersion and absorption of lipids and fat-soluble vitamins (see e.g., Malmsten, M. Surfactants and polymers in drug delivery, Informa Health Care, New York, N.Y., 2002; Brunton, Chapter 38 in: Goodman & Gilman's The Pharmacological Basis of Therapeutics, 9th Ed., Hardman et al. Eds., McGraw-Hill, New York, 1996, pp. 934-935). Various natural bile salts, and their synthetic derivatives, act as penetration enhancers. Thus the term “bile salts” includes any of the naturally occurring components of bile as well as any of their synthetic derivatives. Suitable bile salts include, for example, cholic acid (or its pharmaceutically acceptable sodium salt, sodium cholate), dehydrocholic acid (sodium dehydrocholate), deoxycholic acid (sodium deoxycholate), glucholic acid (sodium glucholate), glycholic acid (sodium glycocholate), glycodeoxycholic acid (sodium glycodeoxycholate), taurocholic acid (sodium taurocholate), taurodeoxycholic acid (sodium taurodeoxycholate), chenodeoxycholic acid (sodium chenodeoxycholate), ursodeoxycholic acid (UDCA), sodium tauro-24,25-dihydro-fusidate (STDHF), sodium glycodihydrofusidate and polyoxyethylene-9-lauryl ether (POE) (see e.g., Malmsten, M. Surfactants and polymers in drug delivery, Informa Health Care, New York, N.Y., 2002; Lee et al., Critical Reviews in Therapeutic Drug Carrier Systems, 1991, page 92; Swinyard, Chapter 39 In: Remington's Pharmaceutical Sciences, 18th Ed., Gennaro, ed., Mack Publishing Co., Easton, Pa., 1990, pages 782-783; Muranishi, Critical Reviews in Therapeutic Drug Carrier Systems, 1990, 7, 1-33; Yamamoto et al., J. Pharm. Exp. Ther., 1992, 263, 25; Yamashita et al., J. Pharm. Sci., 1990, 79, 579-583).

[0733] Chelating agents, as used in connection with the present invention, can be defined as compounds that remove metallic ions from solution by forming complexes therewith, with the result that absorption of iRNAs through the mucosa is enhanced. With regards to their use as penetration enhancers in the present invention, chelating agents have the added advantage of also serving as DNase inhibitors, as most characterized DNA nucleases require a divalent metal ion for catalysis and are thus inhibited by chelating agents (Jarrett, J. Chromatogr., 1993, 618, 315-339). Suitable chelating agents include but are not limited to disodium ethylenediaminetetraacetate (EDTA), citric acid, salicylates (e.g., sodium salicylate, 5-methoxysalicylate and homovanilate), N-acyl derivatives of collagen, laureth-9 and N-amino acyl derivatives of beta-diketones (enamines)(see e.g., Katdare, A. et al., Excipient development for pharmaceutical, biotechnology, and drug delivery, CRC Press, Danvers, Mass., 2006; Lee et al., Critical Reviews in Therapeutic Drug Carrier Systems, 1991, page 92; Muranishi, Critical Reviews in Therapeutic Drug Carrier Systems, 1990, 7, 1-33; Buur et al., J. Control Rel., 1990, 14, 43-51).

[0734] As used herein, non-chelating non-surfactant penetration enhancing compounds can be defined as compounds that demonstrate insignificant activity as chelating agents or as surfactants but that nonetheless enhance absorption of iRNAs through the alimentary mucosa (see e.g., Muranishi, Critical Reviews in Therapeutic Drug Carrier Systems, 1990, 7, 1-33). This class of penetration enhancers includes, for example, unsaturated cyclic ureas, 1-alkyl- and 1-alkenylazacyclo-alkanone derivatives (Lee et al., Critical Reviews in Therapeutic Drug Carrier Systems, 1991, page 92); and non-steroidal anti-inflammatory agents such as diclofenac sodium, indomethacin and phenylbutazone (Yamashita et al., J. Pharm. Pharmacol., 1987, 39, 621-626).

[0735] Agents that enhance uptake of iRNAs at the cellular level can also be added to the pharmaceutical and other compositions of the present invention. For example, cationic lipids, such as lipofectin (Junichi et al, U.S. Pat. No. 5,705,188), cationic glycerol derivatives, and polycationic molecules, such as polylysine (Lollo et al., PCT Application WO 97/30731), are also known to enhance the cellular uptake of dsRNAs. Examples of commercially available transfection reagents include, for example Lipofectamine™ (Invitrogen; Carlsbad, Calif.), Lipofectamine 2000™ (Invitrogen; Carlsbad, Calif.), 293Fectin™ (Invitrogen; Carlsbad, Calif.), Cellfectin™ (Invitrogen; Carlsbad, Calif.), DMRIE-C™ (Invitrogen; Carlsbad, Calif.), FreeStyle™ MAX (Invitrogen; Carlsbad, Calif.), Lipofectamine™ 2000 CD (Invitrogen; Carlsbad, Calif.), Lipofectamine™ (Invitrogen; Carlsbad, Calif.), RNAiMAX (Invitrogen; Carlsbad, Calif.), Oligofectamine™ (Invitrogen; Carlsbad, Calif.), Optifect™ (Invitrogen; Carlsbad, Calif.), X-tremeGENE Q2 Transfection Reagent (Roche; Grenzacherstrasse, Switzerland), DOTAP Liposomal Transfection Reagent (Grenzacherstrasse, Switzerland), DOSPER Liposomal Transfection Reagent (Grenzacherstrasse, Switzerland), or Fugene (Grenzacherstrasse, Switzerland), Transfectam® Reagent (Promega; Madison, Wis.), TransFast™ Transfection Reagent (Promega; Madison, Wis.), Tfx™-20 Reagent (Promega; Madison, Wis.), Tfx™-50 Reagent (Promega; Madison, Wis.), DreamFect™ (OZ Biosciences; Marseille, France), EcoTransfect (OZ Biosciences; Marseille, France), TransPass^{a} D1 Transfection Reagent (New England Biolabs; Ipswich, Mass., USA), LyoVec™/LipoGen™ (Invitrogen; San Diego, Calif., USA), PerFectin Transfection Reagent (Genlantis; San Diego, Calif., USA), NeuroPORTER Transfection Reagent (Genlantis; San Diego, Calif., USA), GenePORTER Transfection reagent (Genlantis; San Diego, Calif., USA), GenePORTER 2 Transfection reagent (Genlantis; San Diego, Calif., USA), Cytofectin Transfection Reagent (Genlantis; San Diego, Calif., USA), BaculoPORTER Transfection Reagent (Genlantis; San Diego, Calif., USA), TroganPORTER™ transfection Reagent (Genlantis; San Diego, Calif., USA), RiboFect (Bioline; Taunton, Mass., USA), PlasFect (Bioline; Taunton, Mass., USA), UniFECTOR (B-Bridge International; Mountain View, Calif., USA), SureFECTOR (B-Bridge International; Mountain View, Calif., USA), or HiFect™ (B-Bridge International, Mountain View, Calif., USA), among others.

[0736] Other agents can be utilized to enhance the penetration of the administered nucleic acids, including glycols such as ethylene glycol and propylene glycol, pyrrols such as 2-pyrrol, azones, and terpenes such as limonene and menthone.

[0737] v. Carriers

[0738] Certain compositions of the present invention also incorporate carrier compounds in the formulation. As used herein, “carrier compound” or “carrier” can refer to a nucleic acid, or analog thereof, which is inert (i.e., does not possess biological activity per se) but is recognized as a nucleic acid by in vivo processes that reduce the bioavailability of a nucleic acid having biological activity by, for example, degrading the biologically active nucleic acid or promoting its removal from circulation. The coadministration of a nucleic acid and a carrier compound, typically with an excess of the latter substance, can result in a substantial reduction of the amount of nucleic acid recovered in the liver, kidney or other extracirculatory reservoirs, presumably due to competition between the carrier compound and the nucleic acid for a common receptor. For example, the recovery of a partially phosphorothioate dsRNA in hepatic tissue can be reduced when it is coadministered with polyinosinic acid, dextran sulfate, polycytidic acid or 4-acetamido-4′isothiocyano-stilbene-2,2′-disulfonic acid (Miyao et al., DsRNA Res. Dev., 1995, 5, 115-121; Takakura et al., DsRNA & Nucl. Acid Drug Dev., 1996, 6, 177-183.

[0739] vi. Excipients

[0740] In contrast to a carrier compound, a “pharmaceutical carrier” or “excipient” is a pharmaceutically acceptable solvent, suspending agent or any other pharmacologically inert vehicle for delivering one or more nucleic acids to an animal. The excipient can be liquid or solid and is selected, with the planned manner of administration in mind, so as to provide for the desired bulk, consistency, etc., when combined with a nucleic acid and the other components of a given pharmaceutical composition. Typical pharmaceutical carriers include, but are not limited to, binding agents (e.g., pregelatinized maize starch, polyvinylpyrrolidone or hydroxypropyl methylcellulose, etc.); fillers (e.g., lactose and other sugars, microcrystalline cellulose, pectin, gelatin, calcium sulfate, ethyl cellulose, polyacrylates or calcium hydrogen phosphate, etc.); lubricants (e.g., magnesium stearate, talc, silica, colloidal silicon dioxide, stearic acid, metallic stearates, hydrogenated vegetable oils, corn starch, polyethylene glycols, sodium benzoate, sodium acetate, etc.); disintegrants (e.g., starch, sodium starch glycolate, etc.); and wetting agents (e.g., sodium lauryl sulphate, etc).

[0741] Pharmaceutically acceptable organic or inorganic excipients suitable for non-parenteral administration which do not deleteriously react with nucleic acids can also be used to formulate the compositions of the present invention. Suitable pharmaceutically acceptable carriers include, but are not limited to, water, salt solutions, alcohols, polyethylene glycols, gelatin, lactose, amylose, magnesium stearate, talc, silicic acid, viscous paraffin, hydroxymethylcellulose, polyvinylpyrrolidone and the like.

[0742] Formulations for topical administration of nucleic acids can include sterile and non-sterile aqueous solutions, non-aqueous solutions in common solvents such as alcohols, or solutions of the nucleic acids in liquid or solid oil bases. The solutions can also contain buffers, diluents and other suitable additives. Pharmaceutically acceptable organic or inorganic excipients suitable for non-parenteral administration which do not deleteriously react with nucleic acids can be used.

[0743] Suitable pharmaceutically acceptable excipients include, but are not limited to, water, salt solutions, alcohol, polyethylene glycols, gelatin, lactose, amylose, magnesium stearate, talc, silicic acid, viscous paraffin, hydroxymethylcellulose, polyvinylpyrrolidone and the like.

[0744] vii. Other Components

[0745] The compositions of the present invention can additionally contain other adjunct components conventionally found in pharmaceutical compositions, at their art-established usage levels. Thus, for example, the compositions can contain additional, compatible, pharmaceutically-active materials such as, for example, antipruritics, astringents, local anesthetics or anti-inflammatory agents, or can contain additional materials useful in physically formulating various dosage forms of the compositions of the present invention, such as dyes, flavoring agents, preservatives, antioxidants, opacifiers, thickening agents and stabilizers. However, such materials, when added, should not unduly interfere with the biological activities of the components of the compositions of the present invention. The formulations can be sterilized and, if desired, mixed with auxiliary agents, e.g., lubricants, preservatives, stabilizers, wetting agents, emulsifiers, salts for influencing osmotic pressure, buffers, colorings, flavorings and/or aromatic substances and the like which do not deleteriously interact with the nucleic acid(s) of the formulation.

[0746] Aqueous suspensions can contain substances which increase the viscosity of the suspension including, for example, sodium carboxymethylcellulose, sorbitol and/or dextran. The suspension can also contain stabilizers.

[0747] In some embodiments, pharmaceutical compositions featured in the invention include (a) one or more iRNA compounds and (b) one or more agents which function by a non-RNAi mechanism and which are useful in treating a hemolytic disorder. Examples of such agents include, but are not limited to an anti-inflammatory agent, anti-steatosis agent, anti-viral, and/or anti-fibrosis agent. In addition, other substances commonly used to protect the liver, such as silymarin, can also be used in conjunction with the iRNAs described herein. Other agents useful for treating liver diseases include telbivudine, entecavir, and protease inhibitors such as telaprevir and other disclosed, for example, in Tung et al., U.S. Application Publication Nos. 2005/0148548, 2004/0167116, and 2003/0144217; and in Hale et al., U.S. Application Publication No. 2004/0127488.

[0748] Toxicity and therapeutic efficacy of such compounds can be determined by standard pharmaceutical procedures in cell cultures or experimental animals, e.g., for determining the LD50 (the dose lethal to 50% of the population) and the ED50 (the dose therapeutically effective in 50% of the population). The dose ratio between toxic and therapeutic effects is the therapeutic index and it can be expressed as the ratio LD50/ED50. Compounds that exhibit high therapeutic indices are preferred.

[0749] The data obtained from cell culture assays and animal studies can be used in formulating a range of dosage for use in humans. The dosage of compositions featured herein in the invention lies generally within a range of circulating concentrations that include the ED50 with little or no toxicity. The dosage can vary within this range depending upon the dosage form employed and the route of administration utilized. For any compound used in the methods featured in the invention, the therapeutically effective dose can be estimated initially from cell culture assays. A dose can be formulated in animal models to achieve a circulating plasma concentration range of the compound or, when appropriate, of the polypeptide product of a target sequence (e.g., achieving a decreased concentration of the polypeptide) that includes the IC50 (i.e., the concentration of the test compound which achieves a half-maximal inhibition of symptoms) as determined in cell culture. Such information can be used to more accurately determine useful doses in humans. Levels in plasma can be measured, for example, by high performance liquid chromatography.

[0750] In addition to their administration, as discussed above, the iRNAs featured in the invention can be administered in combination with other known agents effective in treatment of pathological processes mediated by C5 expression. In any event, the administering physician can adjust the amount and timing of iRNA administration on the basis of results observed using standard measures of efficacy known in the art or described herein.

### VI. Methods for Inhibiting C5 Expression

[0751] The present invention provides methods of inhibiting expression of C5 in a cell. The methods include contacting a cell with an RNAi agent, e.g., a double stranded RNAi agent, in an amount effective to inhibit expression of the C5 in the cell, thereby inhibiting expression of the C5 in the cell.

[0752] Contacting of a cell with a double stranded RNAi agent may be done in vitro or in vivo. Contacting a cell in vivo with the RNAi agent includes contacting a cell or group of cells within a subject, e.g., a human subject, with the RNAi agent. Combinations of in vitro and in vivo methods of contacting are also possible. Contacting may be direct or indirect, as discussed above. Furthermore, contacting a cell may be accomplished via a targeting ligand, including any ligand described herein or known in the art. In preferred embodiments, the targeting ligand is a carbohydrate moiety, e.g., a GalNAc₃ ligand, or any other ligand that directs the RNAi agent to a site of interest, e.g., the liver of a subject.

[0753] The term “inhibiting,” as used herein, is used interchangeably with “reducing,” “silencing,” “downregulating” and other similar terms, and includes any level of inhibition.

[0754] The phrase “inhibiting expression of a C5” is intended to refer to inhibition of expression of any C5 gene (such as, e.g., a mouse C5 gene, a rat C5 gene, a monkey C5 gene, or a human C5 gene) as well as variants or mutants of a C5 gene. Thus, the C5 gene may be a wild-type C5 gene, a mutant C5 gene, or a transgenic C5 gene in the context of a genetically manipulated cell, group of cells, or organism.

[0755] “Inhibiting expression of a C5 gene” includes any level of inhibition of a C5 gene, e.g., at least partial suppression of the expression of a C5 gene. The expression of the C5 gene may be assessed based on the level, or the change in the level, of any variable associated with C5 gene expression, e.g., C5 mRNA level, C5 protein level, or for example, CH₅₀ activity as a measure of total hemolytic complement, AH₅₀ to measure the hemolytic activity of the alternate pathway of complement, and/or lactate dehydrogenase (LDH) levels as a measure of intravascular hemolysis, and/or hemoglobin levels. Levels of C5a, C5b, and soluble C5b-9 complex may also be measured to assess C5 expression. This level may be assessed in an individual cell or in a group of cells, including, for example, a sample derived from a subject.

[0756] Inhibition may be assessed by a decrease in an absolute or relative level of one or more variables that are associated with C5 expression compared with a control level. The control level may be any type of control level that is utilized in the art, e.g., a pre-dose baseline level, or a level determined from a similar subject, cell, or sample that is untreated or treated with a control (such as, e.g., buffer only control or inactive agent control).

[0757] In some embodiments of the methods of the invention, expression of a C5 gene is inhibited by at least about 5%, at least about 10%, at least about 15%, at least about 20%, at least about 25%, at least about 30%, at least about 35%, at least about 40%, at least about 45%, at least about 50%, at least about 55%, at least about 60%, at least about 65%, at least about 70%, at least about 75%, at least about 80%, at least about 85%, at least about 90%, at least about 91%, at least about 92%, at least about 93%, at least about 94%. at least about 95%, at least about 96%, at least about 97%, at least about 98%, or at least about 99%.

[0758] Inhibition of the expression of a C5 gene may be manifested by a reduction of the amount of mRNA expressed by a first cell or group of cells (such cells may be present, for example, in a sample derived from a subject) in which a C5 gene is transcribed and which has or have been treated (e.g., by contacting the cell or cells with an RNAi agent of the invention, or by administering an RNAi agent of the invention to a subject in which the cells are or were present) such that the expression of a C5 gene is inhibited, as compared to a second cell or group of cells substantially identical to the first cell or group of cells but which has not or have not been so treated (control cell(s)). In preferred embodiments, the inhibition is assessed by expressing the level of mRNA in treated cells as a percentage of the level of mRNA in control cells, using the following formula:

$$\frac{( mRNA in control cells ) - ( mRNA in treated cells )}{( mRNA in control cells )} \cdot 100 \%$$

[0759] Alternatively, inhibition of the expression of a C5 gene may be assessed in terms of a reduction of a parameter that is functionally linked to C5 gene expression, e.g., C5 protein expression, hepcidin gene or protein expression, or iron levels in tissues or serum. C5 gene silencing may be determined in any cell expressing C5, either constitutively or by genomic engineering, and by any assay known in the art. The liver is the major site of C5 expression. Other significant sites of expression include the kidneys and the uterus.

[0760] Inhibition of the expression of a C5 protein may be manifested by a reduction in the level of the C5 protein that is expressed by a cell or group of cells (e.g., the level of protein expressed in a sample derived from a subject). As explained above for the assessment of mRNA suppression, the inhibition of protein expression levels in a treated cell or group of cells may similarly be expressed as a percentage of the level of protein in a control cell or group of cells.

[0761] A control cell or group of cells that may be used to assess the inhibition of the expression of a C5 gene includes a cell or group of cells that has not yet been contacted with an RNAi agent of the invention. For example, the control cell or group of cells may be derived from an individual subject (e.g., a human or animal subject) prior to treatment of the subject with an RNAi agent.

[0762] The level of C5 mRNA that is expressed by a cell or group of cells may be determined using any method known in the art for assessing mRNA expression. In one embodiment, the level of expression of C5 in a sample is determined by detecting a transcribed polynucleotide, or portion thereof, e.g., mRNA of the C5 gene. RNA may be extracted from cells using RNA extraction techniques including, for example, using acid phenol/guanidine isothiocyanate extraction (RNAzol B; Biogenesis), RNeasy RNA preparation kits (Qiagen) or PAXgene (PreAnalytix, Switzerland). Typical assay formats utilizing ribonucleic acid hybridization include nuclear run-on assays, RT-PCR, RNase protection assays (Melton et al., Nuc. Acids Res. 12:7035), Northern blotting, in situ hybridization, and microarray analysis.

[0763] In one embodiment, the level of expression of C5 is determined using a nucleic acid probe. The term “probe”, as used herein, refers to any molecule that is capable of selectively binding to a specific C5. Probes can be synthesized by one of skill in the art, or derived from appropriate biological preparations. Probes may be specifically designed to be labeled. Examples of molecules that can be utilized as probes include, but are not limited to, RNA, DNA, proteins, antibodies, and organic molecules.

[0764] Isolated mRNA can be used in hybridization or amplification assays that include, but are not limited to, Southern or Northern analyses, polymerase chain reaction (PCR) analyses and probe arrays. One method for the determination of mRNA levels involves contacting the isolated mRNA with a nucleic acid molecule (probe) that can hybridize to C5 mRNA. In one embodiment, the mRNA is immobilized on a solid surface and contacted with a probe, for example by running the isolated mRNA on an agarose gel and transferring the mRNA from the gel to a membrane, such as nitrocellulose. In an alternative embodiment, the probe(s) are immobilized on a solid surface and the mRNA is contacted with the probe(s), for example, in an Affymetrix gene chip array. A skilled artisan can readily adapt known mRNA detection methods for use in determining the level of C5 mRNA.

[0765] An alternative method for determining the level of expression of C5 in a sample involves the process of nucleic acid amplification and/or reverse transcriptase (to prepare cDNA) of for example mRNA in the sample, e.g., by RT-PCR (the experimental embodiment set forth in Mullis, 1987, U.S. Pat. No. 4,683,202), ligase chain reaction (Barany (1991) Proc. Natl. Acad. Sci. USA 88:189-193), self sustained sequence replication (Guatelli et al. (1990) Proc. Natl. Acad. Sci. USA 87:1874-1878), transcriptional amplification system (Kwoh et al. (1989) Proc. Natl. Acad. Sci. USA 86:1173-1177), Q-Beta Replicase (Lizardi et al. (1988) Bio/Technology 6:1197), rolling circle replication (Lizardi et al., U.S. Pat. No. 5,854,033) or any other nucleic acid amplification method, followed by the detection of the amplified molecules using techniques well known to those of skill in the art. These detection schemes are especially useful for the detection of nucleic acid molecules if such molecules are present in very low numbers. In particular aspects of the invention, the level of expression of C5 is determined by quantitative fluorogenic RT-PCR (i.e., the TaqMan™ System).

[0766] The expression levels of C5 mRNA may be monitored using a membrane blot (such as used in hybridization analysis such as Northern, Southern, dot, and the like), or microwells, sample tubes, gels, beads or fibers (or any solid support comprising bound nucleic acids). See U.S. Pat. Nos. 5,770,722, 5,874,219, 5,744,305, 5,677,195 and 5,445,934, which are incorporated herein by reference. The determination of C5 expression level may also comprise using nucleic acid probes in solution.

[0767] In preferred embodiments, the level of mRNA expression is assessed using branched DNA (bDNA) assays or real time PCR (qPCR). The use of these methods is described and exemplified in the Examples presented herein.

[0768] The level of C5 protein expression may be determined using any method known in the art for the measurement of protein levels. Such methods include, for example, electrophoresis, capillary electrophoresis, high performance liquid chromatography (HPLC), thin layer chromatography (TLC), hyperdiffusion chromatography, fluid or gel precipitin reactions, absorption spectroscopy, a colorimetric assays, spectrophotometric assays, flow cytometry, immunodiffusion (single or double), immunoelectrophoresis, Western blotting, radioimmunoassay (RIA), enzyme-linked immunosorbent assays (ELISAs), immunofluorescent assays, electrochemiluminescence assays, and the like.

[0769] The term “sample” as used herein refers to a collection of similar fluids, cells, or tissues isolated from a subject, as well as fluids, cells, or tissues present within a subject. Examples of biological fluids include blood, serum and serosal fluids, plasma, lymph, urine, cerebrospinal fluid, saliva, ocular fluids, and the like. Tissue samples may include samples from tissues, organs or localized regions. For example, samples may be derived from particular organs, parts of organs, or fluids or cells within those organs. In certain embodiments, samples may be derived from the liver (e.g., whole liver or certain segments of liver or certain types of cells in the liver, such as, e.g., hepatocytes). In preferred embodiments, a “sample derived from a subject” refers to blood or plasma drawn from the subject. In further embodiments, a “sample derived from a subject” refers to liver tissue derived from the subject.

[0770] In some embodiments of the methods of the invention, the RNAi agent is administered to a subject such that the RNAi agent is delivered to a specific site within the subject. The inhibition of expression of C5 may be assessed using measurements of the level or change in the level of C5 mRNA or C5 protein in a sample derived from fluid or tissue from the specific site within the subject. In preferred embodiments, the site is the liver. The site may also be a subsection or subgroup of cells from any one of the aforementioned sites. The site may also include cells that express a particular type of receptor.

[0771] The phrase “contacting a cell with an RNAi agent,” such as a dsRNA, as used herein, includes contacting a cell by any possible means. Contacting a cell with an RNAi agent includes contacting a cell in vitro with the iRNA or contacting a cell in vivo with the iRNA. The contacting may be done directly or indirectly. Thus, for example, the RNAi agent may be put into physical contact with the cell by the individual performing the method, or alternatively, the RNAi agent may be put into a situation that will permit or cause it to subsequently come into contact with the cell.

[0772] Contacting a cell in vitro may be done, for example, by incubating the cell with the RNAi agent. Contacting a cell in vivo may be done, for example, by injecting the RNAi agent into or near the tissue where the cell is located, or by injecting the RNAi agent into another area, e.g., the bloodstream or the subcutaneous space, such that the agent will subsequently reach the tissue where the cell to be contacted is located. For example, the RNAi agent may contain and/or be coupled to a ligand, e.g., GalNAc3, that directs the RNAi agent to a site of interest, e.g., the liver. Combinations of in vitro and in vivo methods of contacting are also possible. For example, a cell may also be contacted in vitro with an RNAi agent and subsequently transplanted into a subject.

[0773] In one embodiment, contacting a cell with an iRNA includes “introducing” or “delivering the iRNA into the cell” by facilitating or effecting uptake or absorption into the cell. Absorption or uptake of an iRNA can occur through unaided diffusive or active cellular processes, or by auxiliary agents or devices. Introducing an iRNA into a cell may be in vitro and/or in vivo. For example, for in vivo introduction, iRNA can be injected into a tissue site or administered systemically. In vivo delivery can also be done by a beta-glucan delivery system, such as those described in U.S. Pat. Nos. 5,032,401 and 5,607,677, and U.S. Publication No. 2005/0281781, the entire contents of which are hereby incorporated herein by reference. In vitro introduction into a cell includes methods known in the art such as electroporation and lipofection. Further approaches are described herein below and/or are known in the art.

### VII. Methods for Treating or Preventing a Complement Component C5-Associated Disorder

[0774] The present invention also provides therapeutic and prophylactic methods which include administering to a subject having a complement component C5-associated disease, e.g., PNH or aHUS, an iRNA agent, pharmaceutical compositions comprising an iRNA agent, or vector comprising an iRNA of the invention. In some aspects of the invention, the methods further include administering to the subject an additional therapeutic agent, such as an anti-complement component C5 antibody, or antigen-binding fragment thereof (e.g., eculizumab).

[0775] In one aspect, the present invention provides methods of treating a subject having a disorder that would benefit from reduction in C5 expression, e.g., a complement component C5-associated disease, e.g., PNH or aHUS. The treatment methods (and uses) of the invention include administering to the subject, e.g., a human, a therapeutically effective amount of an iRNA agent targeting a C5 gene or a pharmaceutical composition comprising an iRNA agent targeting a C5 gene, thereby treating the subject having a disorder that would benefit from reduction in C5 expression.

[0776] In another aspect, the present invention provides methods of treating a subject having a disorder that would benefit from reduction in C5 expression, e.g., a complement component C5-associated disease, e.g., PNH or aHUS, which include administering to the subject, e.g., a human, a therapeutically effective amount of an iRNA agent targeting a C5 gene or a pharmaceutical composition comprising an iRNA agent targeting a C5 gene, and an additional therapeutic agent, such as an anti-complement component C5 antibody, or antigen-binding fragment thereof (e.g., eculizumab), thereby treating the subject having a disorder that would benefit from reduction in C5 expression.

[0777] In one aspect, the invention provides methods of preventing at least one symptom in a subject having a disorder that would benefit from reduction in C5 expression, e.g., a complement component C5-associated disease, e.g., PNH or aHUS. The methods include administering to the subject a prophylactically effective amount of the iRNA agent, e.g., dsRNA, or vector of the invention, thereby preventing at least one symptom in the subject having a disorder that would benefit from reduction in C5 expression. For example, the invention provides methods for preventing hemolysis in a subject suffering from a disorder that would benefit from reduction in C5 expression, e.g., a complement component C5-associated disease, e.g., PNH or aHUS.

[0778] In another aspect, the invention provides methods of preventing at least one symptom in a subject having a disorder that would benefit from reduction in C5 expression, e.g., a complement component C5-associated disease, e.g., PNH or aHUS. The methods include administering to the subject a prophylactically effective amount of the iRNA agent, e.g., dsRNA, or vector of the invention, and an additional therapeutic agent, such as an anti-complement component C5 antibody, or antigen-binding fragment thereof (e.g., eculizumab), thereby preventing at least one symptom in the subject having a disorder that would benefit from reduction in C5 expression.

[0779] “Therapeutically effective amount,” as used herein, is intended to include the amount of an RNAi agent or anti-complement component C5 antibody, or antigen-binding fragment thereof (e.g., eculizumab), that, when administered to a subject having a complement component C5-associated disease, is sufficient to effect treatment of the disease (e.g., by diminishing, ameliorating or maintaining the existing disease or one or more symptoms of disease). The “therapeutically effective amount” may vary depending on the RNAi agent or antibody, or antigen-binding fragment thereof, how the agent is administered, the disease and its severity and the history, age, weight, family history, genetic makeup, the types of preceding or concomitant treatments, if any, and other individual characteristics of the subject to be treated.

[0780] “Prophylactically effective amount,” as used herein, is intended to include the amount of an iRNA agent or anti-complement component C5 antibody, or antigen-binding fragment thereof (e.g., eculizumab), that, when administered to a subject having a complement component C5-associate disease but not yet (or currently) experiencing or displaying symptoms of the disease, and/or a subject at risk of developing a complement component C5-associated disease, e.g., a subject having a graft and/or transplant, e.g., a sensitized or allogenic recipient, a subject having sepsis, and/or a subject having a myocardial infarction, is sufficient to prevent or ameliorate the disease or one or more symptoms of the disease. Ameliorating the disease includes slowing the course of the disease or reducing the severity of later-developing disease. The “prophylactically effective amount” may vary depending on the iRNA agent or anti-complement component C5 antibody, or antigen-binding fragment thereof, how the agent or anti-complement component C5 antibody, or antigen-binding fragment thereof, is administered, the degree of risk of disease, and the history, age, weight, family history, genetic makeup, the types of preceding or concomitant treatments, if any, and other individual characteristics of the patient to be treated.

[0781] A “therapeutically effective amount” or “prophylactically effective amount” also includes an amount of an RNAi agent or anti-complement component C5 antibody, or antigen-binding fragment thereof (e.g., eculizumab), that produces some desired local or systemic effect at a reasonable benefit/risk ratio applicable to any treatment. iRNA agents employed in the methods of the present invention may be administered in a sufficient amount to produce a reasonable benefit/risk ratio applicable to such treatment.

[0782] In another aspect, the present invention provides uses of a therapeutically effective amount of an iRNA agent of the invention for treating a subject, e.g., a subject that would benefit from a reduction and/or inhibition of C5 expression.

[0783] In another aspect, the present invention provides uses of a therapeutically effective amount of an iRNA agent of the invention and an additional therapeutic agent, such as an anti-complement component C5 antibody, or antigen-binding fragment thereof (e.g., eculizumab), for treating a subject, e.g., a subject that would benefit from a reduction and/or inhibition of C5 expression.

[0784] In yet another aspect, the present invention provides use of an iRNA agent, e.g., a dsRNA, of the invention targeting a C5 gene or a pharmaceutical composition comprising an iRNA agent targeting a C5 gene in the manufacture of a medicament for treating a subject, e.g., a subject that would benefit from a reduction and/or inhibition of C5 expression, such as a subject having a disorder that would benefit from reduction in C5 expression, e.g., a complement component C5-associated disease, e.g., PNH or aHUS.

[0785] In another aspect, the present invention provides uses of an iRNA agent, e.g., a dsRNA, of the invention targeting a C5 gene or a pharmaceutical composition comprising an iRNA agent targeting a C5 gene in the manufacture of a medicament for use in combination with an additional therapeutic agent, such as an anti-complement component C5 antibody, or antigen-binding fragment thereof (e.g., eculizumab), for treating a subject, e.g., a subject that would benefit from a reduction and/or inhibition of C5 expression, e.g., a complement component C5-associated disease, e.g., PNH or aHUS.

[0786] In another aspect, the invention provides uses of an iRNA, e.g., a dsRNA, of the invention for preventing at least one symptom in a subject suffering from a disorder that would benefit from a reduction and/or inhibition of C5 expression, such as a complement component C5-associated disease, e.g., PNH or aHUS.

[0787] In yet another aspect, the invention provides uses of an iRNA agent, e.g., a dsRNA, of the invention, and an additional therapeutic agent, such as an anti-complement component C5 antibody, or antigen-binding fragment thereof (e.g., eculizumab), for preventing at least one symptom in a subject suffering from a disorder that would benefit from a reduction and/or inhibition of C5 expression, such as a complement component C5-associated disease, e.g., PNH or aHUS.

[0788] In a further aspect, the present invention provides uses of an iRNA agent of the invention in the manufacture of a medicament for preventing at least one symptom in a subject suffering from a disorder that would benefit from a reduction and/or inhibition of C5 expression, such as a a complement component C5-associated disease, e.g., PNH or aHUS.

[0789] In a further aspect, the present invention provides uses of an iRNA agent of the invention in the manufacture of a medicament for use in combination with an additional therapeutic agent, such as an anti-complement component C5 antibody, or antigen-binding fragment thereof (e.g., eculizumab), for preventing at least one symptom in a subject suffering from a disorder that would benefit from a reduction and/or inhibition of C5 expression, such as a complement component C5-associated disease, e.g., PNH or aHUS.

[0790] In one embodiment, an iRNA agent targeting C5 is administered to a subject having a complement component C5-associated disease such that C5 levels, e.g., in a cell, tissue, blood, urine or other tissue or fluid of the subject are reduced by at least about 10%, 11%, 12%, 13%, 14%, 15%, 16%, 17%, 18%, 19%, 20%, 21%, 22%, 23%, 24%, 25%, 26%, 27%, 28%, 29%, 30%, 31%, 32%, 33%, 34%, 35%, 36%, 37%, 38%, 39%, 40%, 41%, 42%, 43%, 44%, 45%, 46%, 47%, 48%, 49%, 50%, 51%, 52%, 53%, 54%, 55%, 56%, 57%, 58%, 59%, 60%, 61%, 62%, 62%, 64%, 65%, 66%, 67%, 68%, 69%, 70%, 71%, 72%, 73%, 74%, 75%, 76%, 77%, 78%, 79%, 80%, 81%, 82%, 83%, 84%, 85%, 86%, 87%, 88%, 89%, 90%, 91%, 92%, 93%, 94%, 95%, 96%, 97%, 98%, or at least about 99% or more and, subsequently, an additional therapeutic (as described below) is administered to the subject.

[0791] The additional therapeutic may be an anti-complement component C5 antibody, or antigen-binding fragment or derivative thereof. In one embodiment, the anti-complement component C5 antibody is eculizumab (SOLIRIS®), or antigen-binding fragment or derivative thereof. Eculizumab is a humanized monoclonal IgG2/4, kappa light chain antibody that specifically binds complement component C5 with high affinity and inhibits cleavage of C5 to C5a and C5b, thereby inhibiting the generation of the terminal complement complex C5b-9. Eculizumab is described in U.S. Pat. No. 6,355,245, the entire contents of which are incorporated herein by reference.

[0792] The methods of the invention comprising administration of an iRNA agent of the invention and eculizumab to a subject may further comprise administration of a meningococcal vaccine to the subject.

[0793] The additional therapeutic, e.g., eculizumab and/or a meningococcal vaccine, may be administered to the subject at the same time as the iRNA agent targeting C5 or at a different time.

[0794] Moreover, the additional therapeutic, e.g., eculizumab, may be administered to the subject in the same formulation as the iRNA agent targeting C5 or in a different formulation as the iRNA agent targeting C5.

[0795] Eculizumab dosage regimens are described in, for example, the product insert for eculizumab (SOLIRIS®) and in U.S. Patent Application No. 2012/0225056, the entire contents of each of which are incorporated herein by reference. In exemplary methods of the invention for treating a complement component C5-associated disease, e.g., PNH or aHUS, an iRNA agent targeting C5 is administered (e.g., subcutaneously) to the subject first, such that the C5 levels in the subject are reduced (e.g., by at least about 20%, 21%, 22%, 23%, 24%, 25%, 26%, 27%, 28%, 29%, 30%, 31%, 32%, 33%, 34%, 35%, 36%, 37%, 38%, 39%, 40%, 41%, 42%, 43%, 44%, 45%, 46%, 47%, 48%, 49%, 50%, 51%, 52%, 53%, 54%, 55%, 56%, 57%, 58%, 59%, 60%, 61%, 62%, 62%, 64%, 65%, 66%, 67%, 68%, 69%, 70%, 71%, 72%, 73%, 74%, 75%, 76%, 77%, 78%, 79%, 80%, 81%, 82%, 83%, 84%, 85%, 86%, 87%, 88%, 89%, 90%, 91%, 92%, 93%, 94%, 95%, 96%, 97%, 98%, or at least about 99% or more) and subsequently eculizumab is administered at doses lower than the ones described in the product insert for SOLIRIS®. For example, eculizumab may be administered to the subject weekly at a dose less than about 600 mg for 4 weeks followed by a fifth dose at about one week later of less than about 900 mg, followed by a dose less than about 900 mg about every two weeks thereafter. Eculizumab may also be administered to the subject weekly at a dose less than about 900 mg for 4 weeks followed by a fifth dose at about one week later of less than about 1200 mg, followed by a dose less than about 1200 mg about every two weeks thereafter. If the subject is less than 18 years of age, eculizumab may be administered to the subject weekly at a dose less than about 900 mg for 4 weeks followed by a fifth dose at about one week later of less than about 1200 mg, followed by a dose less than about 1200 mg about every two weeks thereafter; or if the subject is less than 18 years of age, eculizumab may be administered to the subject weekly at a dose less than about 600 mg for 2 weeks followed by a third dose at about one week later of less than about 900 mg, followed by a dose less than about 900 mg about every two weeks thereafter; or if the subject is less than 18 years of age, eculizumab may be administered to the subject weekly at a dose less than about 600 mg for 2 weeks followed by a third dose at about one week later of less than about 600 mg, followed by a dose less than about 600 mg about every two weeks thereafter; or if the subject is less than 18 years of age, eculizumab may be administered to the subject weekly at a dose less than about 600 mg for 1 week followed by a second dose at about one week later of less than about 300 mg, followed by a dose less than about 300 mg about every two weeks thereafter; or if the subject is less than 18 years of age, eculizumab may be administered to the subject weekly at a dose less than about 300 mg for 1 week followed by a second dose at about one week later of less than about 300 mg, followed by a dose less than about 300 mg about every two weeks thereafter. If the subject is receiving plasmapheresis or plasma exchange, eculizumab may be administered to the subject at a dose less than about 300 mg (e.g., if the most recent does of eculizumab was about 300 mg) or less than about 600 mg (e.g., if the most recent does of eculizumab was about 600 mg or more). If the subject is receiving plasma infusion, eculizumab may be administered to the subject at a dose less than about 300 mg (e.g., if the most recent does of eculizumab was about 300 mg or more). The lower doses of eculizumab allow for either subcutaneous or intravenous administration of eculizumab.

[0796] In the combination therapies of the present invention comprising eculizumab, eculizumab may be administered to the subject, e.g., subcutaneously, at a dose of about 0.01 mg/kg to about 10 mg/kg, or about 5 mg/kg to about 10 mg/kg, or about 0.5 mg/kg to about 15 mg/kg. For example, eculizumab may be administered to the subject, e.g., subcutaneously, at a dose of 0.5 mg/kg, 1 mg/kg, 1.5 mg/kg, 2 mg/kg, 2.5 mg/kg, 3 mg/kg, 3.5 mg/kg, 4 mg/kg, 4.5 mg/kg, 5 mg/kg, 5.5 mg/kg, 6 mg/kg, 6.5 mg/kg, 7 mg/kg, 7.5 mg/kg, 8 mg/kg, 8.5 mg/kg, 9 mg/kg, 9.5 mg/kg, 10 mg/kg, 10.5 mg/kg, 11 mg/kg, 11.5 mg/kg, 12 mg/kg, 12.5 mg/kg, 13 mg/kg, 13.5 mg/kg, 14 mg/kg, 14.5 mg/kg, or 15 mg/kg.

[0797] The methods and uses of the invention include administering a composition described herein such that expression of the target C5 gene is decreased, such as for about 1, 2, 3, 4, 5, 6, 7, 8, 12, 16, 18, 24, 28, 32, 36, 40, 44, 48, 52, 56, 60, 64, 68, 72, 76, or about 80 hours. In one embodiment, expression of the target C5 gene is decreased for an extended duration, e.g., at least about two, three, four, five, six, seven days or more, e.g., about one week, two weeks, three weeks, or about four weeks or longer.

[0798] Administration of the dsRNA according to the methods and uses of the invention may result in a reduction of the severity, signs, symptoms, and/or markers of such diseases or disorders in a patient with a complement component C5-associated disease. By “reduction” in this context is meant a statistically significant decrease in such level. The reduction can be, for example, at least about 5%, 10%, 15%, 20%, 25%, 30%, 35%, 40%, 45%, 50%, 55%, 60%, 65%, 70%, 75%, 80%, 85%, 90%, 95%, or about 100%.

[0799] Efficacy of treatment or prevention of disease can be assessed, for example by measuring disease progression, disease remission, symptom severity, reduction in pain, quality of life, dose of a medication required to sustain a treatment effect, level of a disease marker or any other measurable parameter appropriate for a given disease being treated or targeted for prevention. It is well within the ability of one skilled in the art to monitor efficacy of treatment or prevention by measuring any one of such parameters, or any combination of parameters. For example, efficacy of treatment of a hemolytic disorder may be assessed, for example, by periodic monitoring of LDH and CH₅₀ levels. Comparisons of the later readings with the initial readings provide a physician an indication of whether the treatment is effective. It is well within the ability of one skilled in the art to monitor efficacy of treatment or prevention by measuring any one of such parameters, or any combination of parameters. In connection with the administration of an iRNA targeting C5 or pharmaceutical composition thereof, “effective against” a complement component C5-associated disease indicates that administration in a clinically appropriate manner results in a beneficial effect for at least a statistically significant fraction of patients, such as improvement of symptoms, a cure, a reduction in disease, extension of life, improvement in quality of life, or other effect generally recognized as positive by medical doctors familiar with treating a complement component C5-associated disease and the related causes.

[0800] A treatment or preventive effect is evident when there is a statistically significant improvement in one or more parameters of disease status, or by a failure to worsen or to develop symptoms where they would otherwise be anticipated. As an example, a favorable change of at least 10% in a measurable parameter of disease, and preferably at least 20%, 30%, 40%, 50% or more can be indicative of effective treatment. Efficacy for a given iRNA drug or formulation of that drug can also be judged using an experimental animal model for the given disease as known in the art. When using an experimental animal model, efficacy of treatment is evidenced when a statistically significant reduction in a marker or symptom is observed.

[0801] Alternatively, the efficacy can be measured by a reduction in the severity of disease as determined by one skilled in the art of diagnosis based on a clinically accepted disease severity grading scale, as but one example the Rheumatoid Arthritis Severity Scale (RASS). Any positive change resulting in e.g., lessening of severity of disease measured using the appropriate scale, represents adequate treatment using an iRNA or iRNA formulation as described herein.

[0802] Subjects can be administered a therapeutic amount of iRNA, such as about 0.01 mg/kg, 0.02 mg/kg, 0.03 mg/kg, 0.04 mg/kg, 0.05 mg/kg, 0.1 mg/kg, 0.15 mg/kg, 0.2 mg/kg, 0.25 mg/kg, 0.3 mg/kg, 0.35 mg/kg, 0.4 mg/kg, 0.45 mg/kg, 0.5 mg/kg, 0.55 mg/kg, 0.6 mg/kg, 0.65 mg/kg, 0.7 mg/kg, 0.75 mg/kg, 0.8 mg/kg, 0.85 mg/kg, 0.9 mg/kg, 0.95 mg/kg, 1.0 mg/kg, 1.1 mg/kg, 1.2 mg/kg, 1.3 mg/kg, 1.4 mg/kg, 1.5 mg/kg, 1.6 mg/kg, 1.7 mg/kg, 1.8 mg/kg, 1.9 mg/kg, 2.0 mg/kg, 2.1 mg/kg, 2.2 mg/kg, 2.3 mg/kg, 2.4 mg/kg, 2.5 mg/kg dsRNA, 2.6 mg/kg dsRNA, 2.7 mg/kg dsRNA, 2.8 mg/kg dsRNA, 2.9 mg/kg dsRNA, 3.0 mg/kg dsRNA, 3.1 mg/kg dsRNA, 3.2 mg/kg dsRNA, 3.3 mg/kg dsRNA, 3.4 mg/kg dsRNA, 3.5 mg/kg dsRNA, 3.6 mg/kg dsRNA, 3.7 mg/kg dsRNA, 3.8 mg/kg dsRNA, 3.9 mg/kg dsRNA, 4.0 mg/kg dsRNA, 4.1 mg/kg dsRNA, 4.2 mg/kg dsRNA, 4.3 mg/kg dsRNA, 4.4 mg/kg dsRNA, 4.5 mg/kg dsRNA, 4.6 mg/kg dsRNA, 4.7 mg/kg dsRNA, 4.8 mg/kg dsRNA, 4.9 mg/kg dsRNA, 5.0 mg/kg dsRNA, 5.1 mg/kg dsRNA, 5.2 mg/kg dsRNA, 5.3 mg/kg dsRNA, 5.4 mg/kg dsRNA, 5.5 mg/kg dsRNA, 5.6 mg/kg dsRNA, 5.7 mg/kg dsRNA, 5.8 mg/kg dsRNA, 5.9 mg/kg dsRNA, 6.0 mg/kg dsRNA, 6.1 mg/kg dsRNA, 6.2 mg/kg dsRNA, 6.3 mg/kg dsRNA, 6.4 mg/kg dsRNA, 6.5 mg/kg dsRNA, 6.6 mg/kg dsRNA, 6.7 mg/kg dsRNA, 6.8 mg/kg dsRNA, 6.9 mg/kg dsRNA, 7.0 mg/kg dsRNA, 7.1 mg/kg dsRNA, 7.2 mg/kg dsRNA, 7.3 mg/kg dsRNA, 7.4 mg/kg dsRNA, 7.5 mg/kg dsRNA, 7.6 mg/kg dsRNA, 7.7 mg/kg dsRNA, 7.8 mg/kg dsRNA, 7.9 mg/kg dsRNA, 8.0 mg/kg dsRNA, 8.1 mg/kg dsRNA, 8.2 mg/kg dsRNA, 8.3 mg/kg dsRNA, 8.4 mg/kg dsRNA, 8.5 mg/kg dsRNA, 8.6 mg/kg dsRNA, 8.7 mg/kg dsRNA, 8.8 mg/kg dsRNA, 8.9 mg/kg dsRNA, 9.0 mg/kg dsRNA, 9.1 mg/kg dsRNA, 9.2 mg/kg dsRNA, 9.3 mg/kg dsRNA, 9.4 mg/kg dsRNA, 9.5 mg/kg dsRNA, 9.6 mg/kg dsRNA, 9.7 mg/kg dsRNA, 9.8 mg/kg dsRNA, 9.9 mg/kg dsRNA, 9.0 mg/kg dsRNA, 10 mg/kg dsRNA, 15 mg/kg dsRNA, 20 mg/kg dsRNA, 25 mg/kg dsRNA, 30 mg/kg dsRNA, 35 mg/kg dsRNA, 40 mg/kg dsRNA, 45 mg/kg dsRNA, or about 50 mg/kg dsRNA. Values and ranges intermediate to the recited values are also intended to be part of this invention.

[0803] In certain embodiments, for example, when a composition of the invention comprises a dsRNA as described herein and a lipid, subjects can be administered a therapeutic amount of iRNA, such as about 0.01 mg/kg to about 5 mg/kg, about 0.01 mg/kg to about 10 mg/kg, about 0.05 mg/kg to about 5 mg/kg, about 0.05 mg/kg to about 10 mg/kg, about 0.1 mg/kg to about 5 mg/kg, about 0.1 mg/kg to about 10 mg/kg, about 0.2 mg/kg to about 5 mg/kg, about 0.2 mg/kg to about 10 mg/kg, about 0.3 mg/kg to about 5 mg/kg, about 0.3 mg/kg to about 10 mg/kg, about 0.4 mg/kg to about 5 mg/kg, about 0.4 mg/kg to about 10 mg/kg, about 0.5 mg/kg to about 5 mg/kg, about 0.5 mg/kg to about 10 mg/kg, about 1 mg/kg to about 5 mg/kg, about 1 mg/kg to about 10 mg/kg, about 1.5 mg/kg to about 5 mg/kg, about 1.5 mg/kg to about 10 mg/kg, about 2 mg/kg to about 2.5 mg/kg, about 2 mg/kg to about 10 mg/kg, about 3 mg/kg to about 5 mg/kg, about 3 mg/kg to about 10 mg/kg, about 3.5 mg/kg to about 5 mg/kg, about 4 mg/kg to about 5 mg/kg, about 4.5 mg/kg to about 5 mg/kg, about 4 mg/kg to about 10 mg/kg, about 4.5 mg/kg to about 10 mg/kg, about 5 mg/kg to about 10 mg/kg, about 5.5 mg/kg to about 10 mg/kg, about 6 mg/kg to about 10 mg/kg, about 6.5 mg/kg to about 10 mg/kg, about 7 mg/kg to about 10 mg/kg, about 7.5 mg/kg to about 10 mg/kg, about 8 mg/kg to about 10 mg/kg, about 8.5 mg/kg to about 10 mg/kg, about 9 mg/kg to about 10 mg/kg, or about 9.5 mg/kg to about 10 mg/kg. Values and ranges intermediate to the recited values are also intended to be part of this invention.

[0804] For example, the dsRNA may be administered at a dose of about 0.1, 0.2, 0.3, 0.4, 0.5, 0.6, 0.7, 0.8, 0.9, 1, 1.1, 1.2, 1.3, 1.4, 1.5, 1.6, 1.7, 1.8, 1.9, 2, 2.1, 2.2, 2.3, 2.4, 2.5, 2.6, 2.7, 2.8, 2.9, 3, 3.1, 3.2, 3.3, 3.4, 3.5, 3.6, 3.7, 3.8, 3.9, 4, 4.1, 4.2, 4.3, 4.4, 4.5, 4.6, 4.7, 4.8, 4.9, 5, 5.1, 5.2, 5.3, 5.4, 5.5, 5.6, 5.7, 5.8, 5.9, 6, 6.1, 6.2, 6.3, 6.4, 6.5, 6.6, 6.7, 6.8, 6.9, 7, 7.1, 7.2, 7.3, 7.4, 7.5, 7.6, 7.7, 7.8, 7.9, 8, 8.1, 8.2, 8.3, 8.4, 8.5, 8.6, 8.7, 8.8, 8.9, 9, 9.1, 9.2, 9.3, 9.4, 9.5, 9.6, 9.7, 9.8, 9.9, or about 10 mg/kg. Values and ranges intermediate to the recited values are also intended to be part of this invention.

[0805] In other embodiments, for example, when a composition of the invention comprises a dsRNA as described herein and an N-acetylgalactosamine, subjects can be administered a therapeutic amount of iRNA, such as a dose of about 0.1 to about 50 mg/kg, about 0.25 to about 50 mg/kg, about 0.5 to about 50 mg/kg, about 0.75 to about 50 mg/kg, about 1 to about 50 mg/mg, about 1.5 to about 50 mg/kb, about 2 to about 50 mg/kg, about 2.5 to about 50 mg/kg, about 3 to about 50 mg/kg, about 3.5 to about 50 mg/kg, about 4 to about 50 mg/kg, about 4.5 to about 50 mg/kg, about 5 to about 50 mg/kg, about 7.5 to about 50 mg/kg, about 10 to about 50 mg/kg, about 15 to about 50 mg/kg, about 20 to about 50 mg/kg, about 20 to about 50 mg/kg, about 25 to about 50 mg/kg, about 25 to about 50 mg/kg, about 30 to about 50 mg/kg, about 35 to about 50 mg/kg, about 40 to about 50 mg/kg, about 45 to about 50 mg/kg, about 0.1 to about 45 mg/kg, about 0.25 to about 45 mg/kg, about 0.5 to about 45 mg/kg, about 0.75 to about 45 mg/kg, about 1 to about 45 mg/mg, about 1.5 to about 45 mg/kb, about 2 to about 45 mg/kg, about 2.5 to about 45 mg/kg, about 3 to about 45 mg/kg, about 3.5 to about 45 mg/kg, about 4 to about 45 mg/kg, about 4.5 to about 45 mg/kg, about 5 to about 45 mg/kg, about 7.5 to about 45 mg/kg, about 10 to about 45 mg/kg, about 15 to about 45 mg/kg, about 20 to about 45 mg/kg, about 20 to about 45 mg/kg, about 25 to about 45 mg/kg, about 25 to about 45 mg/kg, about 30 to about 45 mg/kg, about 35 to about 45 mg/kg, about 40 to about 45 mg/kg, about 0.1 to about 40 mg/kg, about 0.25 to about 40 mg/kg, about 0.5 to about 40 mg/kg, about 0.75 to about 40 mg/kg, about 1 to about 40 mg/mg, about 1.5 to about 40 mg/kb, about 2 to about 40 mg/kg, about 2.5 to about 40 mg/kg, about 3 to about 40 mg/kg, about 3.5 to about 40 mg/kg, about 4 to about 40 mg/kg, about 4.5 to about 40 mg/kg, about 5 to about 40 mg/kg, about 7.5 to about 40 mg/kg, about 10 to about 40 mg/kg, about 15 to about 40 mg/kg, about 20 to about 40 mg/kg, about 20 to about 40 mg/kg, about 25 to about 40 mg/kg, about 25 to about 40 mg/kg, about 30 to about 40 mg/kg, about 35 to about 40 mg/kg, about 0.1 to about 30 mg/kg, about 0.25 to about 30 mg/kg, about 0.5 to about 30 mg/kg, about 0.75 to about 30 mg/kg, about 1 to about 30 mg/mg, about 1.5 to about 30 mg/kb, about 2 to about 30 mg/kg, about 2.5 to about 30 mg/kg, about 3 to about 30 mg/kg, about 3.5 to about 30 mg/kg, about 4 to about 30 mg/kg, about 4.5 to about 30 mg/kg, about 5 to about 30 mg/kg, about 7.5 to about 30 mg/kg, about 10 to about 30 mg/kg, about 15 to about 30 mg/kg, about 20 to about 30 mg/kg, about 20 to about 30 mg/kg, about 25 to about 30 mg/kg, about 0.1 to about 20 mg/kg, about 0.25 to about 20 mg/kg, about 0.5 to about 20 mg/kg, about 0.75 to about 20 mg/kg, about 1 to about 20 mg/mg, about 1.5 to about 20 mg/kb, about 2 to about 20 mg/kg, about 2.5 to about 20 mg/kg, about 3 to about 20 mg/kg, about 3.5 to about 20 mg/kg, about 4 to about 20 mg/kg, about 4.5 to about 20 mg/kg, about 5 to about 20 mg/kg, about 7.5 to about 20 mg/kg, about 10 to about 20 mg/kg, or about 15 to about 20 mg/kg. In one embodiment, when a composition of the invention comprises a dsRNA as described herein and an N-acetylgalactosamine, subjects can be administered a therapeutic amount of about 10 to about 30 mg/kg of dsRNA. Values and ranges intermediate to the recited values are also intended to be part of this invention.

[0806] For example, subjects can be administered a therapeutic amount of iRNA, such as about 0.1, 0.2, 0.3, 0.4, 0.5, 0.6, 0.7, 0.8, 0.9, 1, 1.1, 1.2, 1.3, 1.4, 1.5, 1.6, 1.7, 1.8, 1.9, 2, 2.1, 2.2, 2.3, 2.4, 2.5, 2.6, 2.7, 2.8, 2.9, 3, 3.1, 3.2, 3.3, 3.4, 3.5, 3.6, 3.7, 3.8, 3.9, 4, 4.1, 4.2, 4.3, 4.4, 4.5, 4.6, 4.7, 4.8, 4.9, 5, 5.1, 5.2, 5.3, 5.4, 5.5, 5.6, 5.7, 5.8, 5.9, 6, 6.1, 6.2, 6.3, 6.4, 6.5, 6.6, 6.7, 6.8, 6.9, 7, 7.1, 7.2, 7.3, 7.4, 7.5, 7.6, 7.7, 7.8, 7.9, 8, 8.1, 8.2, 8.3, 8.4, 8.5, 8.6, 8.7, 8.8, 8.9, 9, 9.1, 9.2, 9.3, 9.4, 9.5, 9.6, 9.7, 9.8, 9.9, 10, 10.5, 11, 11.5, 12, 12.5, 13, 13.5, 14, 14.5, 15, 15.5, 16, 16.5, 17, 17.5, 18, 18.5, 19, 19.5, 20, 20.5, 21, 21.5, 22, 22.5, 23, 23.5, 24, 24.5, 25, 25.5, 26, 26.5, 27, 27.5, 28, 28.5, 29, 29.5, 30, 31, 32, 33, 34, 34, 35, 36, 37, 38, 39, 40, 41, 42, 43, 44, 45, 46, 47, 48, 49, or about 50 mg/kg. Values and ranges intermediate to the recited values are also intended to be part of this invention.

[0807] The iRNA can be administered by intravenous infusion over a period of time, such as over a 5, 6, 7, 8, 9, 10, 11, 12, 13, 14, 15, 16, 17, 18, 19, 20, 21, 22, 23, 24, or about a 25 minute period. The administration may be repeated, for example, on a regular basis, such as weekly, biweekly (i.e., every two weeks) for one month, two months, three months, four months or longer. After an initial treatment regimen, the treatments can be administered on a less frequent basis. For example, after administration weekly or biweekly for three months, administration can be repeated once per month, for six months or a year or longer.

[0808] Administration of the iRNA can reduce C5 levels, e.g., in a cell, tissue, blood, urine or other compartment of the patient by at least about 5%, 6%, 7%, 8%, 9%, 10%, 11%, 12%, 13%, 14%, 15%, 16%, 17%, 18%, 19%, 20%, 21%, 22%, 23%, 24%, 25%, 26%, 27%, 28%, 29%, 30%, 31%, 32%, 33%, 34%, 35%, 36%, 37%, 38%, 39%, 40%, 41%, 42%, 43%, 44%, 45%, 46%, 47%, 48%, 49%, 50%, 51%, 52%, 53%, 54%, 55%, 56%, 57%, 58%, 59%, 60%, 61%, 62%, 63%, 64%, 65%, 66%, 67%, 68%, 69%, 70%, 71%, 72%, 73%, 74%, 75%, 76%, 77%, 78%, 79%, 80%, 81%, 82%, 83%, 84%, 85%, 86%, 87%, 88%, 89%, 90%, 91%, 92%, 93%, 94%, 95%, 96%, 97%, 98%, or at least about 99% or more.

[0809] Before administration of a full dose of the iRNA, patients can be administered a smaller dose, such as a 5% infusion, and monitored for adverse effects, such as an allergic reaction. In another example, the patient can be monitored for unwanted immunostimulatory effects, such as increased cytokine (e.g., TNF-alpha or INF-alpha) levels.

[0810] Owing to the inhibitory effects on C5 expression, a composition according to the invention or a pharmaceutical composition prepared therefrom can enhance the quality of life.

[0811] An iRNA of the invention may be administered in “naked” form, or as a “free iRNA.” A naked iRNA is administered in the absence of a pharmaceutical composition. The naked iRNA may be in a suitable buffer solution. The buffer solution may comprise acetate, citrate, prolamine, carbonate, or phosphate, or any combination thereof. In one embodiment, the buffer solution is phosphate buffered saline (PBS). The pH and osmolarity of the buffer solution containing the iRNA can be adjusted such that it is suitable for administering to a subject.

[0812] Alternatively, an iRNA of the invention may be administered as a pharmaceutical composition, such as a dsRNA liposomal formulation.

[0813] Subjects that would benefit from a reduction and/or inhibition of C5 gene expression are those having a complement component C5-associated disease or disorder as described herein. In one embodiment, a subject having a complement component C5-associated disease has paroxysmal nocturnal hemoglobinuria (PNH). In another embodiment, a subject having a complement component C5-associated disease has asthma. In another embodiment, a subject having a complement component C5-associated disease has rheumatoid arthritis. In yet another embodiment, a subject having a complement component C5-associated disease has systemic lupus erythmatosis. In one embodiment, a subject having a complement component C5-associated disease has glomerulonephritis. In another embodiment, a subject having a complement component C5-associated disease has psoriasis. In yet another embodiment, a subject having a complement component C5-associated disease has dermatomyositis bullous pemphigoid. In one embodiment, a subject having a complement component C5-associated disease has atypical hemolytic uremic syndrome. In another embodiment, a subject having a complement component C5-associated disease has Shiga toxin E. coli-related hemolytic uremic syndrome. In another embodiment, a subject having a complement component C5-associated disease has myasthenia gravis. In yet another embodiment, a subject having a complement component C5-associated disease has neuromyelitis optica. In one embodiment, a subject having a complement component C5-associated disease has dense deposit disease. In one embodiment, a subject having a complement component C5-associated disease has C3 neuropathy. In another embodiment, a subject having a complement component C5-associated disease has age-related macular degeneration. In another embodiment, a subject having a complement component C5-associated disease has cold agglutinin disease. In one embodiment, a subject having a complement component C5-associated disease has anti-neutrophil cytoplasmic antibody-associated vasculitis. In another embodiment, a subject having a complement component C5-associated disease has humoral and vascular transplant rejection. In one embodiment, a subject having a complement component C5-associated disease has graft dysfunction. In one embodiment, a subject having a complement component C5-associated disease has had a myocardial infarction. In another embodiment, a subject having a complement component C5-associated disease is a sensitized recipient of a transplant. In yet another embodiment, a subject having a complement component C5-associated disease has sepsis.

[0814] Treatment of a subject that would benefit from a reduction and/or inhibition of C5 gene expression includes therapeutic and prophylactic (e.g., the subject is to undergo sensitized (or allogenic) transplant surgery) treatment.

[0815] The invention further provides methods and uses of an iRNA agent or a pharmaceutical composition thereof (including methods and uses of an iRNA agent or a pharmaceutical composition comprising an iRNA agent and an anti-complement component C5 antibody, or antigen-binding fragment thereof) for treating a subject that would benefit from reduction and/or inhibition of C5 expression, e.g., a subject having a complement component C5-associated disease, in combination with other pharmaceuticals and/or other therapeutic methods, e.g., with known pharmaceuticals and/or known therapeutic methods, such as, for example, those which are currently employed for treating these disorders. For example, in certain embodiments, an iRNA targeting C5 is administered in combination with, e.g., an agent useful in treating a complement component C5-associated disease as described elsewhere herein.

[0816] For example, additional therapeutics and therapeutic methods suitable for treating a subject that would benefit from reduction in C5 expression, e.g., a subject having a complement component C5-associated disease, include plasmaphoresis, thrombolytic therapy (e.g., streptokinase), antiplatelet agents, folic acid, corticosteroids; immunosuppressive agents; estrogens, methotrexate, 6-MP, azathioprine sulphasalazine, mesalazine, olsalazine, chloroquinine/hydroxychloroquine, pencillamine, aurothiomalate (intramuscular and oral), azathioprine, cochicine, corticosteroids (oral, inhaled and local injection), beta-2 adrenoreceptor agonists (salbutamol, terbutaline, salmeteral), xanthines (theophylline, aminophylline), cromoglycate, nedocromil, ketotifen, ipratropium and oxitropium, cyclosporin, FK506, rapamycin, mycophenolate mofetil, leflunomide, NSAIDs, for example, ibuprofen, corticosteroids such as prednisolone, phosphodiesterase inhibitors, adensosine agonists, antithrombotic agents, complement inhibitors, adrenergic agents, agents which interfere with signalling by proinflammatory cytokines, such as TNF-α or IL-1 (e.g., IRAK, NIK, IKK, p38 or MAP kinase inhibitors), IL-1β converting enzyme inhibitors, TNFαconverting enzyme (TACE) inhibitors, T-cell signalling inhibitors, such as kinase inhibitors, metalloproteinase inhibitors, sulfasalazine, azathioprine, 6-mercaptopurines, angiotensin converting enzyme inhibitors, soluble cytokine receptors and derivatives thereof (e.g., soluble p55 or p75 TNF receptors and the derivatives p75TNFRIgG (Enbrel™ and p5STNFRIgG (Lenercept)), sIL-1RI, sIL-1RII, and sIL-6R), antiinflammatory cytokines (e.g., IL-4, IL-10, IL-11, IL-13 and TGFβ), celecoxib, folic acid, hydroxychloroquine sulfate, rofecoxib, etanercept, infliximonoclonal antibody, naproxen, valdecoxib, sulfasalazine, methylprednisolone, meloxicam, methylprednisolone acetate, gold sodium thiomalate, aspirin, triamcinolone acetonide, propoxyphene napsylate/apap, folate, nabumetone, diclofenac, piroxicam, etodolac, diclofenac sodium, oxaprozin, oxycodone hcl, hydrocodone bitartrate/apap, diclofenac sodium/misoprostol, fentanyl, anakinra, human recombinant, tramadol hcl, salsalate, sulindac, cyanocobalamin/fa/pyridoxine, acetaminophen, alendronate sodium, prednisolone, morphine sulfate, lidocaine hydrochloride, indomethacin, glucosamine sulf/chondroitin, amitriptyline hcl, sulfadiazine, oxycodone hcl/acetaminophen, olopatadine hcl, misoprostol, naproxen sodium, omeprazole, cyclophosphamide, rituximonoclonal antibody, IL-1 TRAP, MRA, CTLA4-IG, IL-18 BP, anti-IL-18, Anti-IL15, BIRB-796, SCIO-469, VX-702, AMG-548, VX-740, Roflumilast, IC-485, CDC-801, Mesopram, cyclosporine, cytokine suppressive anti-inflammatory drug(s) (C5AIDs); CDP-571/BAY-10-3356 (humanized anti-TNFα antibody; Celltech/Bayer); cA2/infliximonoclonal antibody (chimeric anti-TNFα antibody; Centocor); 75 kdTNFR-IgG/etanercept (75 kD TNF receptor-IgG fusion protein; Immunex; see e.g., (1994) Arthr. Rheum. 37: 5295; (1996) J. Invest. Med. 44: 235A); 55 kdTNF-IgG (55 kD TNF receptor-IgG fusion protein; Hoffmann-LaRoche); IDEC-CE9.1/SB 210396 (non-depleting primatized anti-CD4 antibody; IDEC/SmithKline; see e.g., (1995) Arthr. Rheum. 38: S185); DAB 486-IL-2 and/or DAB 389-IL-2 (IL-2 fusion proteins; Seragen; see e.g., (1993) Arthrit. Rheum. 36: 1223); Anti-Tac (humanized anti-IL-2Rα; Protein Design Labs/Roche); IL-4 (anti-inflammatory cytokine; DNAX/Schering); IL-10 (SCH 52000; recombinant IL-10, anti-inflammatory cytokine; DNAX/Schering); IL-4; IL-10 and/or IL-4 agonists (e.g., agonist antibodies); IL-1RA (IL-1 receptor antagonist; Synergen/Amgen); anakinra (Kineret®/Amgen); TNF-bp/s-TNF (soluble TNF binding protein; see e.g., (1996) Arthr. Rheum. 39(9 (supplement)): 5284; (1995) Amer. J. Physiol.—Heart and Circ. Physiol. 268: 37-42); R973401 (phosphodiesterase Type IV inhibitor; see e.g., (1996) Arthr. Rheum. 39(9 (supplement): S282); MK-966 (COX-2 Inhibitor; see e.g., (1996) Arthr. Rheum. 39(9 (supplement): S81); Iloprost (see e.g., (1996) Arthr. Rheum. 39(9 (supplement): S82); methotrexate; thalidomide (see e.g., (1996) Arthr. Rheum. 39(9 (supplement): 5282) and thalidomide-related drugs (e.g., Celgen); leflunomide (anti-inflammatory and cytokine inhibitor; see e.g., (1996) Arthr. Rheum. 39(9 (supplement): 5131; (1996) Inflamm. Res. 45: 103-107); tranexamic acid (inhibitor of plasminogen activation; see e.g., (1996) Arthr. Rheum. 39(9 (supplement): S284); T-614 (cytokine inhibitor; see e.g., (1996) Arthr. Rheum. 39(9 (supplement): S282); prostaglandin El (see e.g., (1996) Arthr. Rheum. 39(9 (supplement): S282); Tenidap (non-steroidal anti-inflammatory drug; see e.g., (1996) Arthr. Rheum. 39(9 (supplement): S280); Naproxen (non-steroidal anti-inflammatory drug; see e.g., (1996) Neuro. Report 7: 1209-1213); Meloxicam (non-steroidal anti-inflammatory drug); Ibuprofen (non-steroidal anti-inflammatory drug); Piroxicam (non-steroidal anti-inflammatory drug); Diclofenac (non-steroidal anti-inflammatory drug); Indomethacin (non-steroidal anti-inflammatory drug); Sulfasalazine (see e.g., (1996) Arthr. Rheum. 39(9 (supplement): S281); Azathioprine (see e.g., (1996) Arthr. Rheum. 39(9 (supplement): S281); ICE inhibitor (inhibitor of the enzyme interleukin-1β converting enzyme); zap-70 and/or lck inhibitor (inhibitor of the tyrosine kinase zap-70 or lck); VEGF inhibitor and/or VEGF-R inhibitor (inhibitors of vascular endothelial cell growth factor or vascular endothelial cell growth factor receptor; inhibitors of angiogenesis); corticosteroid anti-inflammatory drugs (e.g., SB203580); TNF-convertase inhibitors; anti-IL-12 antibodies; anti-IL-18 antibodies; interleukin-11 (see e.g., (1996) Arthr. Rheum. 39(9 (supplement): S296); interleukin-13 (see e.g., (1996) Arthr. Rheum. 39(9 (supplement): S308); interleukin-17 inhibitors (see e.g., (1996) Arthr. Rheum. 39(9 (supplement): S120); gold; penicillamine; chloroquine; chlorambucil; hydroxychloroquine; cyclosporine; cyclophosphamide; total lymphoid irradiation; anti-thymocyte globulin; anti-CD4 antibodies; CD5-toxins; orally-administered peptides and collagen; lobenzarit disodium; Cytokine Regulating Agents (CRAs) HP228 and HP466 (Houghten Pharmaceuticals, Inc.); ICAM-1 antisense phosphorothioate oligo-deoxynucleotides (ISIS 2302; Isis Pharmaceuticals, Inc.); soluble complement receptor 1 (TP10; T Cell Sciences, Inc.); prednisone; orgotein; glycosaminoglycan polysulphate; minocycline; anti-IL2R antibodies; marine and botanical lipids (fish and plant seed fatty acids; see e.g., DeLuca et al. (1995) Rheum. Dis. Clin. North Am. 21: 759-777); auranofin; phenylbutazone; meclofenamic acid; flufenamic acid; intravenous immune globulin; zileuton; azaribine; mycophenolic acid (RS-61443); tacrolimus (FK-506); sirolimus (rapamycin); amiprilose (therafectin); cladribine (2-chlorodeoxyadenosine); methotrexate; bcl-2 inhibitors (see Bruncko, M. et al. (2007) J. Med. Chem. 50(4): 641-662); antivirals and immune-modulating agents, small molecule inhibitor of KDR, small molecule inhibitor of Tie-2; methotrexate; prednisone; celecoxib; folic acid; hydroxychloroquine sulfate; rofecoxib; etanercept; infliximonoclonal antibody; leflunomide; naproxen; valdecoxib; sulfasalazine; methylprednisolone; ibuprofen; meloxicam; methylprednisolone acetate; gold sodium thiomalate; aspirin; azathioprine; triamcinolone acetonide; propoxyphene napsylate/apap; folate; nabumetone; diclofenac; piroxicam; etodolac; diclofenac sodium; oxaprozin; oxycodone hcl; hydrocodone bitartrate/apap; diclofenac sodium/misoprostol; fentanyl; anakinra, human recombinant; tramadol hcl; salsalate; sulindac; cyanocobalamin/fa/pyridoxine; acetaminophen; alendronate sodium; prednisolone; morphine sulfate; lidocaine hydrochloride; indomethacin; glucosamine sulfate/chondroitin; cyclosporine; amitriptyline hcl; sulfadiazine; oxycodone hcl/acetaminophen; olopatadine hcl; misoprostol; naproxen sodium; omeprazole; mycophenolate mofetil; cyclophosphamide; rituximonoclonal antibody; IL-1 TRAP; MRA; CTLA4-IG; IL-18 BP; IL-12/23; anti-IL 18; anti-IL 15; BIRB-796; SCIO-469; VX-702; AMG-548; VX-740; Roflumilast; IC-485; CDC-801; mesopram, albuterol, salmeterol/fluticasone, montelukast sodium, fluticasone propionate, budesonide, prednisone, salmeterol xinafoate, levalbuterol hcl, albuterol sulfate/ipratropium, prednisolone sodium phosphate, triamcinolone acetonide, beclomethasone dipropionate, ipratropium bromide, azithromycin, pirbuterol acetate, prednisolone, theophylline anhydrous, methylprednisolone sodium succinate, clarithromycin, zafirlukast, formoterol fumarate, influenza virus vaccine, methylprednisolone, amoxicillin trihydrate, flunisolide, allergy injection, cromolyn sodium, fexofenadine hydrochloride, flunisolide/menthol, amoxicillin/clavulanate, levofloxacin, inhaler assist device, guaifenesin, dexamethasone sodium phosphate, moxifloxacin hcl, doxycycline hyclate, guaifenesin/d-methorphan, p-ephedrine/cod/chlorphenir, gatifloxacin, cetirizine hydrochloride, mometasone furoate, salmeterol xinafoate, benzonatate, cephalexin, pe/hydrocodone/chlorphenir, cetirizine hcl/pseudoephed, phenylephrine/cod/promethazine, codeine/promethazine, cefprozil, dexamethasone, guaifenesin/pseudoephedrine, chlorpheniramine/hydrocodone, nedocromil sodium, terbutaline sulfate, epinephrine, methylprednisolone, metaproterenol sulfate, aspirin, nitroglycerin, metoprolol tartrate, enoxaparin sodium, heparin sodium, clopidogrel bisulfate, carvedilol, atenolol, morphine sulfate, metoprolol succinate, warfarin sodium, lisinopril, isosorbide mononitrate, digoxin, furosemide, simvastatin, ramipril, tenecteplase, enalapril maleate, torsemide, retavase, losartan potassium, quinapril hcl/mag carb, bumetanide, alteplase, enalaprilat, amiodarone hydrochloride, tirofiban hcl m-hydrate, diltiazem hydrochloride, captopril, irbesartan, valsartan, propranolol hydrochloride, fosinopril sodium, lidocaine hydrochloride, eptifibatide, cefazolin sodium, atropine sulfate, aminocaproic acid, spironolactone, interferon, sotalol hydrochloride, potassium chloride, docusate sodium, dobutamine hcl, alprazolam, pravastatin sodium, atorvastatin calcium, midazolam hydrochloride, meperidine hydrochloride, isosorbide dinitrate, epinephrine, dopamine hydrochloride, bivalirudin, rosuvastatin, ezetimibe/simvastatin, avasimibe, and cariporide.

[0817] The iRNA agent (and/or an anti-complement component C5 antibody) and an additional therapeutic agent and/or treatment may be administered at the same time and/or in the same combination, e.g., parenterally, or the additional therapeutic agent can be administered as part of a separate composition or at separate times and/or by another method known in the art or described herein.

[0818] The present invention also provides methods of using an iRNA agent of the invention and/or a composition containing an iRNA agent of the invention to reduce and/or inhibit complement component C5 expression in a cell. In other aspects, the present invention provides an iRNA of the invention and/or a composition comprising an iRNA of the invention for use in reducing and/or inhibiting C5 expression in a cell. In yet other aspects, use of an iRNA of the invention and/or a composition comprising an iRNA of the invention for the manufacture of a medicament for reducing and/or inhibiting C5 expression in a cell are provided.

[0819] The methods and uses include contacting the cell with an iRNA, e.g., a dsRNA, of the invention and maintaining the cell for a time sufficient to obtain degradation of the mRNA transcript of a C5 gene, thereby inhibiting expression of the C5 gene in the cell.

[0820] Reduction in gene expression can be assessed by any methods known in the art. For example, a reduction in the expression of C5 may be determined by determining the mRNA expression level of C5 using methods routine to one of ordinary skill in the art, e.g., Northern blotting, qRT-PCR, by determining the protein level of C5 using methods routine to one of ordinary skill in the art, such as Western blotting, immunological techniques, flow cytometry methods, ELISA, and/or by determining a biological activity of C5, such as CH₅₀ or AH₅₀ hemolysis assay, and/or by determining the biological activity of one or more molecules associated with the complement system, e.g., C5 products, such as C5a and C5b (or, in an in vivo setting, e.g., hemolysis).

[0821] In the methods and uses of the invention the cell may be contacted in vitro or in vivo, i.e., the cell may be within a subject. In embodiments of the invention in which the cell is within a subject, the methods may include further contacting the cell with an anti-complement component C5 antibody, e.g., eculizumab.

[0822] A cell suitable for treatment using the methods of the invention may be any cell that expresses a C5 gene. A cell suitable for use in the methods and uses of the invention may be a mammalian cell, e.g., a primate cell (such as a human cell or a non-human primate cell, e.g., a monkey cell or a chimpanzee cell), a non-primate cell (such as a cow cell, a pig cell, a camel cell, a llama cell, a horse cell, a goat cell, a rabbit cell, a sheep cell, a hamster, a guinea pig cell, a cat cell, a dog cell, a rat cell, a mouse cell, a lion cell, a tiger cell, a bear cell, or a buffalo cell), a bird cell (e.g., a duck cell or a goose cell), or a whale cell. In one embodiment, the cell is a human cell, e.g., a human liver cell.

[0823] C5 expression may be inhibited in the cell by at least about 5%, 6%, 7%, 8%, 9%, 10%, 11%, 12%, 13%, 14%, 15%, 16%, 17%, 18%, 19%, 20%, 21%, 22%, 23%, 24%, 25%, 26%, 27%, 28%, 29%, 30%, 31%, 32%, 33%, 34%, 35%, 36%, 37%, 38%, 39%, 40%, 41%, 42%, 43%, 44%, 45%, 46%, 47%, 48%, 49%, 50%, 51%, 52%, 53%, 54%, 55%, 56%, 57%, 58%, 59%, 60%, 61%, 62%, 63%, 64%, 65%, 66%, 67%, 68%, 69%, 70%, 71%, 72%, 73%, 74%, 75%, 76%, 77%, 78%, 79%, 80%, 81%, 82%, 83%, 84%, 85%, 86%, 87%, 88%, 89%, 90%, 91%, 92%, 93%, 94%, 95%, 96%, 97%, 98%, 99%, or about 100%.

[0824] The in vivo methods and uses of the invention may include administering to a subject a composition containing an iRNA, where the iRNA includes a nucleotide sequence that is complementary to at least a part of an RNA transcript of the C5 gene of the mammal to be treated. When the organism to be treated is a mammal such as a human, the composition can be administered by any means known in the art including, but not limited to subcutaneous, intravenous, oral, intraperitoneal, or parenteral routes, including intracranial (e.g., intraventricular, intraparenchymal and intrathecal), intramuscular, transdermal, airway (aerosol), nasal, rectal, and topical (including buccal and sublingual) administration. In certain embodiments, the compositions are administered by subcutaneous or intravenous infusion or injection.

[0825] In some embodiments, the administration is via a depot injection. A depot injection may release the iRNA in a consistent way over a prolonged time period. Thus, a depot injection may reduce the frequency of dosing needed to obtain a desired effect, e.g., a desired inhibition of C5, or a therapeutic or prophylactic effect. A depot injection may also provide more consistent serum concentrations. Depot injections may include subcutaneous injections or intramuscular injections. In preferred embodiments, the depot injection is a subcutaneous injection.

[0826] In some embodiments, the administration is via a pump. The pump may be an external pump or a surgically implanted pump. In certain embodiments, the pump is a subcutaneously implanted osmotic pump. In other embodiments, the pump is an infusion pump. An infusion pump may be used for intravenous, subcutaneous, arterial, or epidural infusions. In preferred embodiments, the infusion pump is a subcutaneous infusion pump. In other embodiments, the pump is a surgically implanted pump that delivers the iRNA to the liver.

[0827] The mode of administration may be chosen based upon whether local or systemic treatment is desired and based upon the area to be treated. The route and site of administration may be chosen to enhance targeting.

[0828] In one aspect, the present invention also provides methods for inhibiting the expression of a C5 gene in a mammal, e.g., a human. The present invention also provides a composition comprising an iRNA, e.g., a dsRNA, that targets a C5 gene in a cell of a mammal for use in inhibiting expression of the C5 gene in the mammal. In another aspect, the present invention provides use of an iRNA, e.g., a dsRNA, that targets a C5 gene in a cell of a mammal in the manufacture of a medicament for inhibiting expression of the C5 gene in the mammal.

[0829] The methods and uses include administering to the mammal, e.g., a human, a composition comprising an iRNA, e.g., a dsRNA, that targets a C5 gene in a cell of the mammal and maintaining the mammal for a time sufficient to obtain degradation of the mRNA transcript of the C5 gene, thereby inhibiting expression of the C5 gene in the mammal. In some embodiment, the methods further comprise administering an anti-complement component C5 antibody, e.g., eculizumab, to the subject.

[0830] Reduction in gene expression can be assessed by any methods known it the art and by methods, e.g. qRT-PCR, described herein. Reduction in protein production can be assessed by any methods known it the art and by methods, e.g., ELISA or Western blotting, described herein. In one embodiment, a puncture liver biopsy sample serves as the tissue material for monitoring the reduction in C5 gene and/or protein expression. In another embodiment, a blood sample serves as the tissue material for monitoring the reduction in C5 gene and/or protein expression. In other embodiments, inhibition of the expression of a C5 gene is monitored indirectly by, for example, determining the expression and/or activity of a gene in a C5 pathway, including, for example, C5a, C5b, and soluble C5b-9 (see, e.g., FIG. 1). For example, the activity of CD59 may be monitored to determine the inhibition of expression of a C5 gene. CH₅₀, AH₅₀, clot formation and/or serum lactate dehydrogenase (LDH), in a sample, e.g., a blood or liver sample, may also be measured. Suitable assays are further described in the Examples section below.

[0831] Unless otherwise defined, all technical and scientific terms used herein have the same meaning as commonly understood by one of ordinary skill in the art to which this invention belongs. Although methods and materials similar or equivalent to those described herein can be used in the practice or testing of the iRNAs and methods featured in the invention, suitable methods and materials are described below. All publications, patent applications, patents, and other references mentioned herein are incorporated by reference in their entirety. In case of conflict, the present specification, including definitions, will control. In addition, the materials, methods, and examples are illustrative only and not intended to be limiting.

### EXAMPLES

### Example 1. iRNA Synthesis

### Source of Reagents

[0832] Where the source of a reagent is not specifically given herein, such reagent can be obtained from any supplier of reagents for molecular biology at a quality/purity standard for application in molecular biology.

### Transcripts

[0833] siRNA design was carried out to identify siRNAs targeting human, rhesus (Macaca mulatta), mouse, and rat C5 transcripts annotated in the NCBI Gene database (http://www.ncbi.nlm.nih.gov/gene/). Design used the following transcripts from the NCBI RefSeq collection: Human—NM_001735.2; Rhesus—XM_001095750.2; Mouse—NM_010406.2; Rat—XM_345342.4. SiRNA duplexes were designed in several separate batches, including but not limited to batches containing duplexes matching human and rhesus transcripts only; human, rhesus, and mouse transcripts only; human, rhesus, mouse, and rat transcripts only; and mouse and rat transcripts only. All siRNA duplexes were designed that shared 100% identity with the listed human transcript and other species transcripts considered in each design batch (above).

siRNA Design, Specificity, and Efficacy Prediction

[0834] The predicted specificity of all possible 19mers was predicted from each sequence. Candidate 19mers were then selected that lacked repeats longer than 7 nucleotides. These 2971 candidate human/rhesus, 142 human/rhesus/mouse, 54 human/rhesus/mouse/rat, and 807 mouse/rat siRNAs were used in comprehensive searches against the appropriate transcriptomes (defined as the set of NM_{—} and XM_{—} records within the human, rhesus, dog, mouse, or rat NCBI Refseq sets) using an exhaustive “brute-force” algorithm implemented in the python script ‘BruteForce.py’. The script next parsed the transcript-oligo alignments to generate a score based on the position and number of mismatches between the siRNA and any potential ‘off-target’ transcript. The off-target score is weighted to emphasize differences in the ‘seed’ region of siRNAs, in positions 2-9 from the 5′-end of the molecule.

[0835] Each oligo-transcript pair from the brute-force search was given a mismatch score by summing the individual mismatch scores; mismatches in the position 2-9 were counted as 2.8, mismatches in the cleavage site positions 10-11 were counted as 1.2, and mismatches in region 12-19 counted as 1.0. An additional off-target prediction was carried out by comparing the frequency of heptamers and octomers derived from 3 distinct, seed-derived hexamers of each oligo. The hexamers from positions 2-7 relative to the 5′ start were used to create 2 heptamers and one octamer. ‘Heptamer1’ was created by adding a 3′-A to the hexamer; heptamer2 was created by adding a 5′-A to the hexamer; the octomer was created by adding an A to both 5′- and 3′-ends of the hexamer. The frequency of octamers and heptamers in the human, rhesus, mouse, or rat 3′-UTRome (defined as the subsequence of the transcriptome from NCBI's Refseq database where the end of the coding region, the ‘CDS’, is clearly defined) was pre-calculated. The octamer frequency was normalized to the heptamer frequency using the median value from the range of octamer frequencies. A ‘mirSeedScore’ was then calculated by calculating the sum of ((3× normalized octamer count)+(2× heptamer2 count)+(1× heptamer1 count)).

[0836] Both siRNAs strands were assigned to a category of specificity according to the calculated scores: a score above 3 qualifies as highly specific, equal to 3 as specific and between 2.2 and 2.8 as moderately specific. The duplexes were sorted by the specificity of the antisense strand and those duplexes whose antisense oligos lacked GC at the first position, lacked G at both positions 13 and 14, and had 3 or more Us or As in the seed region were selected.

[0837] For GalNaC-conjugated duplexes, sense 21mer and antisense 23mer oligos were designed by extending antisense 19mers (described above) to 23 nucleotides of target-complementary sequence. All species transcripts included in the design batch were checked for complementarity. Only 23mers that preserved 100% sequence complementarity in at least 2 species were used. For each duplex, the sense 21mer was specified as the reverse complement of the first 21 nucleotides of the antisense strand.

siRNA Sequence Selection

[0838] A total of 23 sense and 23 antisense derived human/rhesus, 6 sense and 6 antisense human/rhesus/mouse, 6 sense and 6 antisense derived human/rhesus/mouse/mouse/rat, and 13 sense and 13 antisense derived mouse/rat siRNA 19mer oligos were synthesized and formed into duplexes.

[0839] The above 19mer sets were extended to 21/23mer duplexes for GalNac conjugate design and re-classified according to their new species matches. Twenty-seven sense and 27 antisense derived human/rhesus, 1 sense and 1 sense derived human/rhesus/mouse, 3 sense and 3 antisense derived human/rhesus/rat, 4 sense and 4 antisense derived human/rhesus/mouse/rat, and 13 sense and 13 antisense derived mouse/rat 21mer (sense) and 23mer (antisense) oligos were synthesized and formed into duplexes.

[0840] A detailed list of C5 sense and antisense strand sequences is shown in Tables 3-6.

siRNA Synthesis

[0841] General Small and Medium Scale RNA Synthesis Procedure

[0842] RNA oligonucleotides were synthesized at scales between 0.2-500 μmol using commercially available 5′-O-(4,4′-dimethoxytrityl)-2′-O-t-butyldimethylsilyl-3′-O-(2-cyanoethyl-N,N-diisopropyl)phosphoramidite monomers of uridine, 4-N-acetylcytidine, 6-N-benzoyladenosine and 2-N-isobutyrylguanosine and the corresponding 2′-O-methyl and 2′-fluoro phosphoramidites according to standard solid phase oligonucleotide synthesis protocols. The amidite solutions were prepared at 0.1-0.15 M concentration and 5-ethylthio-1H-tetrazole (0.25-0.6 M in acetonitrile) was used as the activator. Phosphorothioate backbone modifications were introduced during synthesis using 0.2 M phenylacetyl disulfide (PADS) in lutidine:acetonitrile (1:1) (v;v) or 0.1 M 3-(dimethylaminomethylene) amino-3H-1,2,4-dithiazole-5-thione (DDTT) in pyridine for the oxidation step. After completion of synthesis, the sequences were cleaved from the solid support and deprotected using methylamine followed by triethylamine.3HF to remove any 2′-O-t-butyldimethylsilyl protecting groups present.

[0843] For synthesis scales between 5-500 μmol and fully 2′ modified sequences (2′-fluoro and/or 2′-O-methyl or combinations thereof) the oligonucleotides where deprotected using 3:1 (v/v) ethanol and concentrated (28-32%) aqueous ammonia either at 35° C. 16 h or 55° C. for 5.5 h. Prior to ammonia deprotection the oligonucleotides where treated with 0.5 M piperidine in acetonitrile for 20 min on the solid support. The crude oligonucleotides were analyzed by LC-MS and anion-exchange HPLC (IEX-HPLC). Purification of the oligonucleotides was carried out by IEX HPLC using: 20 mM phosphate, 10%-15% ACN, pH=8.5 (buffer A) and 20 mM phosphate, 10%-15% ACN, 1 M NaBr, pH=8.5 (buffer B). Fractions were analyzed for purity by analytical HPLC. The product-containing fractions with suitable purity were pooled and concentrated on a rotary evaporator prior to desalting. The samples were desalted by size exclusion chromatography and lyophilized to dryness. Equal molar amounts of sense and antisense strands were annealed in 1×PBS buffer to prepare the corresponding siRNA duplexes.

[0844] For small scales (0.2-1 μmol), synthesis was performed on a MerMade 192 synthesizer in a 96 well format. In case of fully 2′-modified sequences (2′-fluoro and/or 2′-O-methyl or combinations thereof) the oligonucleotides where deprotected using methylamine at room temperature for 30-60 min followed by incubation at 60° C. for 30 min or using 3:1 (v/v) ethanol and concentrated (28-32%) aqueous ammonia at room temperature for 30-60 min followed by incubation at 40° C. for 1.5 hours. The crude oligonucleotides were then precipitated in a solution of acetonitrile:acetone (9:1) and isolated by centrifugation and decanting the supernatant. The crude oligonucleotide pellet was re-suspended in 20 mM NaOAc buffer and analyzed by LC-MS and anion exchange HPLC. The crude oligonucleotide sequences were desalted in 96 deep well plates on a 5 mL HiTrap Sephadex G25 column (GE Healthcare). In each well about 1.5 mL samples corresponding to an individual sequence was collected. These purified desalted oligonucleotides were analyzed by LC-MS and anion exchange chromatography. Duplexes were prepared by annealing equimolar amounts of sense and antisense sequences on a Tecan robot. Concentration of duplexes was adjusted to 10 μM in 1×PBS buffer.

[0845] Synthesis of GalNAc-Conjugated Oligonucleotides for In Vivo Analysis

[0846] Oligonucleotides conjugated with GalNAc ligand at their 3′-terminus were synthesized at scales between 0.2-500 μmol using a solid support pre-loaded with a Y-shaped linker bearing a 4,4′-dimethoxytrityl (DMT)-protected primary hydroxy group for oligonucleotide synthesis and a GalNAc ligand attached through a tether.

[0847] For synthesis of GalNAc conjugates in the scales between 5-500 μmol, the above synthesis protocol for RNA was followed with the following adaptions: For polystyrene-based synthesis supports 5% dichloroacetic acid in toluene was used for DMT-cleavage during synthesis. Cleavage from the support and deprotection was performed as described above. Phosphorothioate-rich sequences (usually >5 phorphorothioates) were synthesized without removing the final 5′-DMT group (“DMT-on”) and, after cleavage and deprotection as described above, purified by reverse phase HPLC using 50 mM ammonium acetate in water (buffer A) and 50 mM ammoniumacetate in 80% acetonitrile (buffer B). Fractions were analyzed for purity by analytical HPLC and/or LC-MS. The product-containing fractions with suitable purity were pooled and concentrated on a rotary evaporator. The DMT-group was removed using 20%-25% acetic acid in water until completion. The samples were desalted by size exclusion chromatography and lyophilized to dryness. Equal molar amounts of sense and antisense strands were annealed in 1×PBS buffer to prepare the corresponding siRNA duplexes.

[0848] For small scale synthesis of GalNAc conjugates (0.2-1 μmol), including sequences with multiple phosphorothioate linkages, the protocols described above for synthesis of RNA or fully 2′-F/2′-OMe-containing sequences on MerMade platform were applied. Synthesis was performed on pre-packed columns containing GalNAc-functionalized controlled pore glass support.

### Example 2. In Vitro Screening

### Cell Culture and Transfections

[0849] Hep3B cells (ATCC, Manassas, Va.) were grown to near confluence at 37° C. in an atmosphere of 5% CO2 in Eagle's Minimum Essential Medium (ATCC) supplemented with 10% FBS, streptomycin, and glutamine (ATCC) before being released from the plate by trypsinization. Cells were washed and re-suspended at 0.25×10⁶ cells/ml. During transfections, cells were plated onto a 96-well plate with about 20,000 cells per well.

[0850] Primary mouse hepatocytes (PMH) were freshly isolated from a C57BL/6 female mouse (Charles River Laboratories International, Inc. Willmington, Mass.) less than 1 hour prior to transfections and grown in primary hepatocyte media. Cells were resuspended at 0.11×10⁶ cells/ml in InVitroGRO CP Rat (plating) medium (Celsius In Vitro Technologies, catalog number S01494). During transfections, cells were plated onto a BD BioCoat 96 well collagen plate (BD, 356407) at 10,000 cells per well and incubated at 37° C. in an atmosphere of 5% CO₂.

[0851] Cryopreserved Primary Cynomolgus Hepatocytes (Celsis In Vitro Technologies, M003055-P) were thawed at 37° C. water bath immediately prior to usage and re-suspended at 0.26×10⁶ cells/ml in InVitroGRO CP (plating) medium (Celsis In Vitro Technologies, catalog number Z99029). During transfections, cells were plated onto a BD BioCoat 96 well collagen plate (BD, 356407) at 25,000 cells per well and incubated at 37° C. in an atmosphere of 5% CO₂.

[0852] For Hep3B, PMH, and primary Cynomolgus hepatocytes, transfection was carried out by adding 14.8 μl of Opti-MEM plus 0.2 μl of Lipofectamine RNAiMax per well (Invitrogen, Carlsbad Calif. catalog number 13778-150) to 5 μl of each siRNA duplex to an individual well in a 96-well plate. The mixture was then incubated at room temperature for 20 minutes. Eighty μl of complete growth media without antibiotic containing the appropriate cell number were then added to the siRNA mixture. Cells were incubated for 24 hours prior to RNA purification.

[0853] Single dose experiments were performed at 10 nM and 0.1 nM final duplex concentration for GalNAc modified sequences or at 1 nM and 0.01 nM final duplex concentration for all other sequences. Dose response experiments were done at 3, 1, 0.3, 0.1, 0.037, 0.0123, 0.00412, and 0.00137 nM final duplex concentration for primary mouse hepatocytes and at 3, 1, 0.3, 0.1, 0.037, 0.0123, 0.00412, 0.00137, 0.00046, 0.00015, 0.00005, and 0.000017 nM final duplex concentration for Hep3B cells.

### Free Uptake Transfection

[0854] Free uptake experiments were performed by adding 10 μl of siRNA duplexes in PBS per well into a 96 well plate. Ninety μl of complete growth media containing appropriate cell number for the cell type was then added to the siRNA. Cells were incubated for 24 hours prior to RNA purification. Single dose experiments were performed at 500 nM and 5 nM final duplex concentration and dose response experiments were done at 1000, 333, 111, 37, 12.3, 4.12, 1.37, 0.46 nM final duplex concentration.

Total RNA Isolation Using DYNABEADS mRNA Isolation Kit (Invitrogen, Part #: 610-12)

[0855] Cells were harvested and lysed in 150 μl of Lysis/Binding Buffer then mixed for 5 minutes at 850 rpm using an Eppendorf Thermomixer (the mixing speed was the same throughout the process). Ten microliters of magnetic beads and 80 μl Lysis/Binding Buffer mixture were added to a round bottom plate and mixed for 1 minute. Magnetic beads were captured using a magnetic stand and the supernatant was removed without disturbing the beads. After removing the supernatant, the lysed cells were added to the remaining beads and mixed for 5 minutes. After removing the supernatant, magnetic beads were washed 2 times with 150 μl Wash Buffer A and mixed for 1 minute. The beads were captured again and the supernatant was removed. The beads were then washed with 150 μl Wash Buffer B, captured and the supernatant was removed. The beads were next washed with 150 μl Elution Buffer, captured and the supernatant removed. Finally, the beads were allowed to dry for 2 minutes. After drying, 50 μl of Elution Buffer was added and mixed for 5 minutes at 70° C. The beads were captured on magnet for 5 minutes. Forty-five μl of supernatant was removed and added to another 96 well plate.

cDNA Synthesis Using ABI High Capacity cDNA Reverse Transcription Kit (Applied Biosystems, Foster City, Calif., Cat #4368813)

[0856] A master mix of 2 μl 10× Buffer, 0.8 μl 25×dNTPs, 2 μl Random primers, 1 μl Reverse Transcriptase, 1 μl RNase inhibitor and 3.2 μl of H2O per reaction as prepared. Equal volumes master mix and RNA were mixed for a final volume of 12 μl for in vitro screened or 20 μl for in vivo screened samples. cDNA was generated using a Bio-Rad C-1000 or S-1000 thermal cycler (Hercules, Calif.) through the following steps: 25° C. for 10 minutes, 37° C. for 120 minutes, 85° C. for 5 seconds, and 4° C. hold.

### Real Time PCR

[0857] Two μl of cDNA were added to a master mix containing 2 μl of H₂O, 0.5 μl GAPDH TaqMan Probe (Life Technologies catalog number 4326317E for Hep3B cells, catalog number 352339E for primary mouse hepatocytes or custom probe for cynomolgus primary hepatocytes), 0.5 μl C5 TaqMan probe (Life Technologies c catalog number Hs00156197_m1 for Hep3B cells or mm00439275_m1 for Primary Mouse Hepatoctyes or custom probe for cynomolgus primary hepatocytes) and 5 μl Lightcycler 480 probe master mix (Roche catalog number 04887301001) per well in a 384 well plates (Roche catalog number 04887301001). Real time PCR was performed in an Roche LC480 Real Time PCR system (Roche) using the ΔΔCt(RQ) assay. For in vitro screening, each duplex was tested with two biological replicates unless otherwise noted and each Real Time PCR was performed in duplicate technical replicates. For in vivo screening, each duplex was tested in one or more experiments (3 mice per group) and each Real Time PCR was run in duplicate technical replicates.

[0858] To calculate relative fold change in C5 mRNA levels, real time data were analyzed using the ΔΔCt method and normalized to assays performed with cells transfected with 10 nM AD-1955, or mock transfected cells. IC₅₀s were calculated using a 4 parameter fit model using XLFit and normalized to cells transfected with AD-1955 over the same dose range, or to its own lowest dose.

[0859] The sense and antisense sequences of AD-1955 are:

SENSE:

(SEQ ID NO: 13)

cuuAcGcuGAGuAcuucGAdTsdT;
ANTISENSE:

(SEQ ID NO: 14)

UCGAAGuACUcAGCGuAAGdTsdT.

[0860] Table 7 shows the results of a single dose screen in Hep3B cells transfected with the indicated GalNAC conjugated modified iRNAs. Data are expressed as percent of message remaining relative to untreated cells.

[0861] Table 8 shows the results of a single dose transfection screen in primary mouse hepatocytes transfected with the indicated GalNAC conjugated modified iRNAs. Data are expressed as percent of message remaining relative to untreated cells.

[0862] Table 9 shows the results of a single dose free uptake screen in primary Cynomolgus hepatocytes with the indicated GalNAC conjugated modified iRNAs. Data are expressed as percent of message remaining relative to untreated cells.

[0863] Table 10 shows the results of a single dose free uptake screen in primary mouse hepatocytes with the indicated GalNAC conjugated modified iRNAs. Data are expressed as percent of message remaining relative to untreated cells.

[0864] Table 11 shows the dose response of a free uptake screen in primary Cynomolgus hepatocytes with the indicated GalNAC conjugated modified iRNAs. The indicated IC₅₀ values represent the IC₅₀ values relative to untreated cells.

[0865] Table 12 shows the dose response of a free uptake screen in primary mouse hepatocytes with the indicated GalNAC conjugated modified iRNAs. The indicated IC₅₀ values represent the IC₅₀ values relative to untreated cells.

[0866] Table 13 shows the results of a single dose screen in Hep3B cells transfected with the indicated modified and unmodified iRNAs. Data are expressed as percent of message remaining relative to untreated cells. The 0.01 nM dose was a single biological transfection and the 1 nM dose was a duplicate biological transfection.

[0867] Table 14 shows the results of a single dose screen in primary mouse hepatocytes transfected with the indicated modified and unmodified iRNAs. Data are expressed as percent of message remaining relative to untreated cells.

[0868] Table 15 shows the dose response in Hep3B cells transfected with the indicated modified and unmodified iRNAs. The indicated IC₅₀ values represent the IC₅₀ values relative to untreated cells.

[0869] Table 16 shows the dose response in primary mouse hepatocytes transfected with the indicated modified and unmodified iRNAs. The indicated IC₅₀ values represent the IC₅₀ values relative to untreated cells.

TABLE 2
Abbreviations of nucleotide monomers used in nucleic acid sequence
representation. It will be understood that these monomers, when present
in an oligonucleotide, are mutually linked by 5′-3′-phosphodiester bonds.

| Abbreviation | Nucleotide(s) |
|---|---|
| A | Adenosine-3′-phosphate |
| Af | 2′-fluoroadenosine-3′-phosphate |
| Afs | 2′-fluoroadenosine-3′-phosphorothioate |
| As | adenosine-3′-phosphorothioate |
| C | cytidine-3′-phosphate |
| Cf | 2′-fluorocytidine-3′-phosphate |
| Cfs | 2′-fluorocytidine-3′-phosphorothioate |
| Cs | cytidine-3′-phosphorothioate |
| G | guanosine-3′-phosphate |
| Gf | 2′-fluoroguanosine-3′-phosphate |
| Gfs | 2′-fluoroguanosine-3′-phosphorothioate |
| Gs | guanosine-3′-phosphorothioate |
| T | 5′-methyluridine-3′-phosphate |
| Tf | 2′-fluoro-5-methyluridine-3′-phosphate |
| Tfs | 2′-fluoro-5-methyluridine-3′-phosphorothioate |
| Ts | 5-methyluridine-3′-phosphorothioate |
| U | Uridine-3′-phosphate |
| Uf | 2′-fluorouridine-3′-phosphate |
| Ufs | 2′-fluorouridine-3′-phosphorothioate |
| Us | uridine-3′-phosphorothioate |
| N | any nucleotide (G, A, C, T or U) |
| a | 2′-O-methyladenosine-3′-phosphate |
| as | 2′-O-methyladenosine-3′-phosphorothioate |
| c | 2′-O-methylcytidine-3′-phosphate |
| cs | 2′-O-methylcytidine-3′-phosphorothioate |
| g | 2′-O-methylguanosine-3′-phosphate |
| gs | 2′-O-methylguanosine-3′-phosphorothioate |
| t | 2′-O-methyl-5-methyluridine-3′-phosphate |
| ts | 2′-O-methyl-5-methyluridine-3′-phosphorothioate |
| u | 2′-O-methyluridine-3′-phosphate |
| us | 2′-O-methyluridine-3′-phosphorothioate |
| s | phosphorothioate linkage |
| L96 | N-[tris(GalNAc-alkyl)-amidodecanoyl)]-4- |
| | hydroxyprolinol Hyp-(GalNAc-alkyl)3 |
| (dt) | deoxy-thymine |

TABLE 3
Unmodified Sense and Antisense Strand Sequences of C5 dsRNAs

| | | | SEQ ID | | | | |
|---|---|---|---|---|---|---|---|
| Duplex ID | Sense strand | Sense Unmodified Sequence | NO: | Antisense | Antisense Unmodified Sequence | SEQ ID NO: | Species_Oligo name¹ |
| AD-58093.1² UM³ | A-118310.1 | AAUAACUCACUAUAAUUACUU | 15 | A-118311.1 | AAGUAAUUAUAGUGAGUUAUUUU | 66 | NM_001735.2_1517-1539_as |
| AD-58099.1 UM | A-118312.1 | UGACAAAAUAACUCACUAUAA | 16 | A-118313.1 | UUAUAGUGAGUUAUUUUGUCAAU | 67 | NM_001735.2_1511-1533_as |
| AD-58105.1 UM | A-118314.1 | CUUCCUCUGGAAAUUGGCCUU | 17 | A-118315.1 | AAGGCCAAUUUCCAGAGGAAGCA | 68 | NM_001735.2_2733-2755_as |
| AD-58111.1 UM | A-118316.1 | GACAAAAUAACUCACUAUAAU | 18 | A-118317.1 | AUUAUAGUGAGUUAUUUUGUCAA | 69 | NM_001735.2_1512-1534_as |
| AD-58117.1 UM | A-118318.1 | UCCUCUGGAAAUUGGCCUUCA | 19 | A-118319.1 | UGAAGGCCAAUUUCCAGAGGAAG | 70 | NM_001735.2_2735-2757_as |
| AD-58123.1 UM | A-118320.1 | AAGCAAGAUAUUUUUAUAAUA | 20 | A-118321.1 | UAUUAUAAAAAUAUCUUGCUUUU | 71 | NM_001735.2_784-806_as |
| AD-58129.1 UM | A-118322.1 | AAAAUGUUUUUGUCAAGUACA | 21 | A-118323.1 | UGUACUUGACAAAAACAUUUUCU | 72 | NM_001735.2_4744-4766_as |
| AD-58088.1 UM | A-118324.1 | AUUUAAACAACAAGUACCUUU | 22 | A-118325.1 | AAAGGUACUUGUUGUUUAAAUCU | 73 | NM_001735.2_982-1004_as |
| AD-58094.1 UM | A-118326.1 | AUUCAGAAAGUCUGUGAAGGA | 23 | A-118327.1 | UCCUUCACAGACUUUCUGAAUUU | 74 | NM_001735.2_4578-4600_as |
| AD-58100.1 UM | A-118328.1 | ACACUGAAGCAUUUGAUGCAA | 24 | A-118329.1 | UUGCAUCAAAUGCUUCAGUGUAU | 75 | NM_001735.2_169-191_as |
| AD-58106.1 UM | A-118330.1 | GCAGUUCUGUGUUAAAAUGUC | 25 | A-118331.1 | GACAUUUUAACACAGAACUGCAU | 76 | NM_001735.2_2591-2613_as |
| AD-58112.1 UM | A-118332.1 | AGGAUUUUGAGUGUAAAAGGA | 26 | A-118333.1 | UCCUUUUACACUCAAAAUCCUUU | 77 | NM_001735.2_2955-2977_as |
| AD-58118.1 UM | A-118334.1 | AAUGAUGAACCUUGUAAAGAA | 27 | A-118335.1 | UUCUUUACAAGGUUCAUCAUUUU | 78 | NM_001735.2_2025-2047_as |
| AD-58124.1 UM | A-118336.1 | AUCAUUGGAACAUUUUUCAUU | 28 | A-118337.1 | AAUGAAAAAUGUUCCAAUGAUUU | 79 | NM_001735.2_3118-3140_as |
| AD-58130.1 UM | A-118338.1 | AGCCAGAAAUUCGGAGUUAUU | 29 | A-118339.1 | AAUAACUCCGAAUUUCUGGCUUG | 80 | NM_001735.2_2317-2339_as |
| AD-58089.1 UM | A-118340.1 | UCCCUGGGAGAUAAAACUCAC | 30 | A-118341.1 | GUGAGUUUUAUCUCCCAGGGAAA | 81 | NM_001735.2_3618-3640_as |
| AD-58095.1 UM | A-118342.1 | GAAAAUGAUGAACCUUGUAAA | 31 | A-118343.1 | UUUACAAGGUUCAUCAUUUUCUU | 82 | NM_001735.2_2022-2044_as |
| AD-58101.1 UM | A-118344.1 | AUUGCUCAAGUCACAUUUGAU | 32 | A-118345.1 | AUCAAAUGUGACUUGAGCAAUUC | 83 | NM_001735.2_918-940_as |
| AD-58107.1 UM | A-118346.1 | GAGAUUGCAUAUGCUUAUAAA | 33 | A-118347.1 | UUUAUAAGCAUAUGCAAUCUCUG | 84 | NM_001735.2_4698-4720_as |
| AD-58113.1 UM | A-118348.1 | GUUAUCCUGAUAAAAAAUUUA | 34 | A-118349.1 | UAAAUUUUUUAUCAGGAUAACUU | 85 | NM_001735.2_205-227_as |
| AD-58119.1 UM | A-118350.1 | AGGAAGUUUGCAGCUUUUAUU | 35 | A-118351.1 | AAUAAAAGCUGCAAACUUCCUCA | 86 | NM_001735.2_4147-4169_as |
| AD-58125.1 UM | A-118352.1 | GAAGAAAUUGAUCAUAUUGGA | 36 | A-118353.1 | UCCAAUAUGAUCAAUUUCUUCUA | 87 | NM_001735.2_555-577_as |
| AD-58131.1 UM | A-118354.1 | AUCCUGAUAAAAAAUUUAGUU | 37 | A-118355.1 | AACUAAAUUUUUUAUCAGGAUAA | 88 | NM_001735.2_208-230_as |
| AD-58090.1 UM | A-118356.1 | UGGAAAAGAAAUCUUAGUAAA | 38 | A-118357.1 | UUUACUAAGAUUUCUUUUCCAAA | 89 | NM_001735.2_2786-2808_as |
| AD-58096.1 UM | A-118358.1 | UCUUAUCAAAGUAUAAACAUU | 39 | A-118359.1 | AAUGUUUAUACUUUGAUAAGAUG | 90 | NM_001735.2_1596-1618_as |
| AD-58102.1 UM | A-118360.1 | UCCCUACAAACUGAAUUUGGU | 40 | A-118361.1 | ACCAAAUUCAGUUUGUAGGGAGA | 91 | NM_001735.2_1082-1104_as |
| AD-58108.1 UM | A-118362.1 | CAGGAGCAAACAUAUGUCAUU | 41 | A-118363.1 | AAUGACAUAUGUUUGCUCCUGUC | 92 | NM_001735.2_87-109_as |
| AD-58114.1 UM | A-118364.1 | ACAUGUAACAACUGUAGUUCA | 42 | A-118365.1 | UGAACUACAGUUGUUACAUGUAC | 93 | NM_001735.2_4109-4131_as |
| AD-58120.1 UM | A-118366.1 | CAGGAAAUCAUUGGAACAUUU | 43 | A-118367.1 | AAAUGUUCCAAUGAUUUCCUGUU | 94 | NM_001735.2_3112-3134_as |
| AD-58126.1 UM | A-118368.1 | UUUAAGAAUUUUGAAAUUACU | 44 | A-118369.1 | AGUAAUUUCAAAAUUCUUAAAGU | 95 | NM_001735.2_759-781_as |
| AD-58132.1 UM | A-118370.1 | UAUUCUGCAACUGAAUUCGAU | 45 | A-118371.1 | AUCGAAUUCAGUUGCAGAAUAAC | 96 | NM_001735.2_4412-4434_as |
| AD-58091.1 UM | A-118372.1 | GCCCUUGGAAAGAGUAUUUCA | 46 | A-118373.1 | UGAAAUACUCUUUCCAAGGGCUU | 97 | NM_001735.2_1886-1908_as |
| AD-58097.1 UM | A-118374.1 | CCUGAUAAAAAAUUUAGUUAC | 47 | A-118375.1 | GUAACUAAAUUUUUUAUCAGGAU | 98 | NM_001735.2_210-232_as |
| AD-58103.1 UM | A-118376.1 | CCCUUGGAAAGAGUAUUUCAA | 48 | A-118377.1 | UUGAAAUACUCUUUCCAAGGGCU | 99 | NM_001735.2_1887-1909_as |
| AD-58121.1 UM | A-118382.1 | UGCAGAUCAAACACAAUUUCA | 49 | A-118383.1 | UGAAAUUGUGUUUGAUCUGCAGA | 100 | NM_010406.2_4943-4965_as |
| AD-58133.1 UM | A-118386.1 | CAGAUCAAACACAAUUUCAGU | 50 | A-118387.1 | ACUGAAAUUGUGUUUGAUCUGCA | 101 | NM_010406.2_4945-4967_as |
| AD-58116.1 UM | A-118396.1 | GUUCCGGAUAUUUGAACUUUU | 51 | A-118397.1 | AAAAGUUCAAAUAUCCGGAACCG | 102 | NM_010406.2_4500-4522_as |
| AD-58644.1 UM | A-119328.1 | AUUUAAACAACAAGUACCUUU | 52 | A-119329.1 | AAAGGUACUUGUUGUUUAAAUCU | 103 | NM_001735.2_982-1004_as |
| AD-58651.1 UM | A-119328.2 | AUUUAAACAACAAGUACCUUU | 53 | A-119339.1 | AAAGGUACUUGUUGUUUAAAUCU | 104 | NM_001735.2_982-1004_as |
| AD-58641.1 UM | A-119322.1 | UGACAAAAUAACUCACUAUAA | 54 | A-119323.1 | UUAUAGUGAGUUAUUUUGUCAAU | 105 | NM_001735.2_1511-1533_as |
| AD-58648.1 UM | A-119322.2 | UGACAAAAUAACUCACUAUAA | 55 | A-119336.1 | UUAUAGUGAGUUAUUUUGUCAAU | 106 | NM_001735.2_1511-1533_as |
| AD-58642.1 UM | A-119324.1 | GACAAAAUAACUCACUAUAAU | 56 | A-119325.1 | AUUAUAGUGAGUUAUUUUGUCAA | 107 | NM_001735.2_1512-1534_as |
| AD-58649.1 UM | A-119324.2 | GACAAAAUAACUCACUAUAAU | 57 | A-119337.1 | AUUAUAGUGAGUUAUUUUGUCAA | 108 | NM_001735.2_1512-1534_as |
| AD-58647.1 UM | A-119334.1 | GUUCCGGAUAUUUGAACUUUU | 58 | A-119335.1 | AAAAGUUCAAAUAUCCGGAACCG | 109 | NM_010406.2_4500-4522_as |
| AD-58654.1 UM | A-119334.2 | GUUCCGGAUAUUUGAACUUUU | 59 | A-119342.1 | AAAAGUUCAAAUAUCCGGAACCG | 110 | NM_010406.2_4500-4522_as |
| AD-58645.1 UM | A-119330.1 | UGCAGAUCAAACACAAUUUCA | 60 | A-119331.1 | UGAAAUUGUGUUUGAUCUGCAGA | 111 | NM_010406.2_4943-4965_as |
| AD-58652.1 UM | A-119330.2 | UGCAGAUCAAACACAAUUUCA | 61 | A-119340.1 | UGAAAUUGUGUUUGAUCUGCAGA | 112 | NM_010406.2_4943-4965_as |
| AD-58643.1 UM | A-119326.1 | AAGCAAGAUAUUUUUAUAAUA | 62 | A-119327.1 | UAUUAUAAAAAUAUCUUGCUUUU | 113 | NM_001735.2_784-806_as |
| AD-58650.1 UM | A-119326.2 | AAGCAAGAUAUUUUUAUAAUA | 63 | A-119338.1 | UAUUAUAAAAAUAUCUUGCUUUU | 114 | NM_001735.2_784-806_as |
| AD-58646.1 UM | A-119332.1 | CAGAUCAAACACAAUUUCAGU | 64 | A-119333.1 | ACUGAAAUUGUGUUUGAUCUGCA | 115 | NM_010406.2_4945-4967_as |
| AD-58653.1 UM | A-119332.2 | CAGAUCAAACACAAUUUCAGU | 65 | A-119341.1 | ACUGAAAUUGUGUUUGAUCUGCA | 116 | NM_010406.2_4945-4967_as |

¹The Species Oligo name reflects the GenBank record (e.g., NM_001735.2) and the position in the nucleotide sequence of the GenBank record (e.g., 1517-1539) that the antisense strand targets.
²The number following the decimal point refers to the lot number.
³UM = unmodified

TABLE 4
GalNAC Conujugated Modified Sense and Antisense Strand Sequences of C5 dsRNAs

| | | | SEQ | | | SEQ | |
|---|---|---|---|---|---|---|---|
| | | | ID | | | ID | Species_Oligo |
| Duplex ID | Sense strand | Sense sequence | NO: | Antisense | Antisense sequence | NO: | name⁴ |
| AD-58093.1 | A-118310.1 | AfaUfaAfcUfcAfCfUfaUfaAfuUfaCfuUfL96 | 117 | A-118311.1 | aAfgUfaAfuUfaUfaguGfaGfuUfaUfusUfsu | 168 | |
| AD-58099.1 | A-118312.1 | UfgAfcAfaAfaUfAfAfcUfcAfcUfaUfaAfL96 | 118 | A-118313.1 | uUfaUfaGfuGfaGfuuaUfuUfuGfuCfasAfsu | 169 | |
| AD-58105.1 | A-118314.1 | CfuUfcCfuCfuGfGfAfaAfuUfgGfcCfuUfL96 | 119 | A-118315.1 | aAfgGfcCfaAfuUfuccAfgAfgGfaAfgsCfsa | 170 | |
| AD-58111.1 | A-118316.1 | GfaCfaAfaAfuAfAfCfuCfaCfuAfuAfaUfL96 | 120 | A-118317.1 | aUfuAfuAfgUfgAfguuAfuUfuUfgUfcsAfsa | 171 | |
| AD-58117.1 | A-118318.1 | UfcCfuCfuGfgAfAfAfuUfgGfcCfuUfcAfL96 | 121 | A-118319.1 | uGfaAfgGfcCfaAfuuuCfcAfgAfgGfasAfsg | 172 | |
| AD-58123.1 | A-118320.1 | AfaGfcAfaGfaUfAfUfuUfuUfaUfaAfuAfL96 | 122 | A-118321.1 | uAfuUfaUfaAfaAfauaUfcUfuGfcUfusUfsu | 173 | |
| AD-58129.1 | A-118322.1 | AfaAfaUfgUfuUfUfUfgUfcAfaGfuAfcAfL96 | 123 | A-118323.1 | uGfuAfcUfuGfaCfaaaAfaCfaUfuUfusCfsu | 174 | |
| AD-58088.1 | A-118324.1 | AfuUfuAfaAfcAfAfCfaAfgUfaCfcUfuUfL96 | 124 | A-118325.1 | aAfaGfgUfaCfuUfguuGfuUfuAfaAfusCfsu | 175 | |
| AD-58094.1 | A-118326.1 | AfuUfcAfgAfaAfGfUfcUfgUfgAfaGfgAfL96 | 125 | A-118327.1 | uCfcUfuCfaCfaGfacuUfuCfuGfaAfusUfsu | 176 | |
| AD-58100.1 | A-118328.1 | AfcAfcUfgAfaGfCfAfuUfuGfaUfgCfaAfL96 | 126 | A-118329.1 | uUfgCfaUfcAfaAfugcUfuCfaGfuGfusAfsu | 177 | |
| AD-58106.1 | A-118330.1 | GfcAfgUfuCfuGfUfGfuUfaAfaAfuGfuCfL96 | 127 | A-118331.1 | gAfcAfuUfuUfaAfcacAfgAfaCfuGfcsAfsu | 178 | |
| AD-58112.1 | A-118332.1 | AfgGfaUfuUfuGfAfGfuGfuAfaAfaGfgAfL96 | 128 | A-118333.1 | uCfcUfuUfuAfcAfcucAfaAfaUfcCfusUfsu | 179 | |
| AD-58118.1 | A-118334.1 | AfaUfgAfuGfaAfCfCfuUfgUfaAfaGfaAfL96 | 129 | A-118335.1 | uUfcUfuUfaCfaAfgguUfcAfuCfaUfusUfsu | 180 | |
| AD-58124.1 | A-118336.1 | AfuCfaUfuGfgAfAfCfaUfuUfuUfcAfuUfL96 | 130 | A-118337.1 | aAfuGfaAfaAfaUfguuCfcAfaUfgAfusUfsu | 181 | |
| AD-58130.1 | A-118338.1 | AfgCfcAfgAfaAfUfUfcGfgAfgUfuAfuUfL96 | 131 | A-118339.1 | aAfuAfaCfuCfcGfaauUfuCfuGfgCfusUfsg | 182 | |
| AD-58089.1 | A-118340.1 | UfcCfcUfgGfgAfGfAfuAfaAfaCfuCfaCfL96 | 132 | A-118341.1 | gUfgAfgUfuUfuAfucuCfcCfaGfgGfasAfsa | 183 | |
| AD-58095.1 | A-118342.1 | GfaAfaAfuGfaUfGfAfaCfcUfuGfuAfaAfL96 | 133 | A-118343.1 | uUfuAfcAfaGfgUfucaUfcAfuUfuUfcsUfsu | 184 | |
| AD-58101.1 | A-118344.1 | AfuUfgCfuCfaAfGfUfcAfcAfuUfuGfaUfL96 | 134 | A-118345.1 | aUfcAfaAfuGfuGfacuUfgAfgCfaAfusUfsc | 185 | |
| AD-58107.1 | A-118346.1 | GfaGfaUfuGfcAfUfAfuGfcUfuAfuAfaAfL96 | 135 | A-118347.1 | uUfuAfuAfaGfcAfuauGfcAfaUfcUfcsUfsg | 186 | |
| AD-58113.1 | A-118348.1 | GfuUfaUfcCfuGfAfUfaAfaAfaAfuUfuAfL96 | 136 | A-118349.1 | uAfaAfuUfuUfuUfaucAfgGfaUfaAfcsUfsu | 187 | |
| AD-58119.1 | A-118350.1 | AfgGfaAfgUfuUfGfCfaGfcUfuUfuAfuUfL96 | 137 | A-118351.1 | aAfuAfaAfaGfcUfgcaAfaCfuUfcCfusCfsa | 188 | |
| AD-58125.1 | A-118352.1 | GfaAfgAfaAfuUfGfAfuCfaUfaUfuGfgAfL96 | 138 | A-118353.1 | uCfcAfaUfaUfgAfucaAfuUfuCfuUfcsUfsa | 189 | |
| AD-58131.1 | A-118354.1 | AfuCfcUfgAfuAfAfAfaAfaUfuUfaGfuUfL96 | 139 | A-118355.1 | aAfcUfaAfaUfuUfuuuAfuCfaGfgAfusAfsa | 190 | |
| AD-58090.1 | A-118356.1 | UfgGfaAfaAfgAfAfAfuCfuUfaGfuAfaAfL96 | 140 | A-118357.1 | uUfuAfcUfaAfgAfuuuCfuUfuUfcCfasAfsa | 191 | |
| AD-58096.1 | A-118358.1 | UfcUfuAfuCfaAfAfGfuAfuAfaAfcAfuUfL96 | 141 | A-118359.1 | aAfuGfuUfuAfuAfcuuUfgAfuAfaGfasUfsg | 192 | |
| AD-58102.1 | A-118360.1 | UfcCfcUfaCfaAfAfCfuGfaAfuUfuGfgUfL96 | 142 | A-118361.1 | aCfcAfaAfuUfcAfguuUfgUfaGfgGfasGfsa | 193 | |
| AD-58108.1 | A-118362.1 | CfaGfgAfgCfaAfAfCfaUfaUfgUfcAfuUfL96 | 143 | A-118363.1 | aAfuGfaCfaUfaUfguuUfgCfuCfcUfgsUfsc | 194 | |
| AD-58114.1 | A-118364.1 | AfcAfuGfuAfaCfAfAfcUfgUfaGfuUfcAfL96 | 144 | A-118365.1 | uGfaAfcUfaCfaGfuugUfuAfcAfuGfusAfsc | 195 | |
| AD-58120.1 | A-118366.1 | CfaGfgAfaAfuCfAfUfuGfgAfaCfaUfuUfL96 | 145 | A-118367.1 | aAfaUfgUfuCfcAfaugAfuUfuCfcUfgsUfsu | 196 | |
| AD-58126.1 | A-118368.1 | UfuUfaAfgAfaUfUfUfuGfaAfaUfuAfcUfL96 | 146 | A-118369.1 | aGfuAfaUfuUfcAfaaaUfuCfuUfaAfasGfsu | 197 | |
| AD-58132.1 | A-118370.1 | UfaUfuCfuGfcAfAfCfuGfaAfuUfcGfaUfL96 | 147 | A-118371.1 | aUfcGfaAfuUfcAfguuGfcAfgAfaUfasAfsc | 198 | |
| AD-58091.1 | A-118372.1 | GfcCfcUfuGfgAfAfAfgAfgUfaUfuUfcAfL96 | 148 | A-118373.1 | uGfaAfaUfaCfuCfuuuCfcAfaGfgGfcsUfsu | 199 | |
| AD-58097.1 | A-118374.1 | CfcUfgAfuAfaAfAfAfaUfuUfaGfuUfaCfL96 | 149 | A-118375.1 | gUfaAfcUfaAfaUfuuuUfuAfuCfaGfgsAfsu | 200 | |
| AD-58103.1 | A-118376.1 | CfcCfuUfgGfaAfAfGfaGfuAfuUfuCfaAfL96 | 150 | A-118377.1 | uUfgAfaAfuAfcUfcuuUfcCfaAfgGfgsCfsu | 201 | |
| AD-58121.1 | A-118382.1 | UfgCfaGfaUfcAfAfAfcAfcAfaUfuUfcAfL96 | 151 | A-118383.1 | uGfaAfaUfuGfuGfuuuGfaUfcUfgCfasGfsa | 202 | |
| AD-58133.1 | A-118386.1 | CfaGfaUfcAfaAfCfAfcAfaUfuUfcAfgUfL96 | 152 | A-118387.1 | aCfuGfaAfaUfuGfuguUfuGfaUfcUfgsCfsa | 203 | |
| AD-58116.1 | A-118396.1 | GfuUfcCfgGfaUfAfUfuUfgAfaCfuUfuUfL96 | 153 | A-118397.1 | aAfaAfgUfuCfaAfauaUfcCfgGfaAfcsCfsg | 204 | |
| AD-58644.1 | A-119328.1 | AfsusUfuAfaAfcAfAfCfaAfgUfaCfcUfuUfL96 | 154 | A-119329.1 | asAfsaGfgUfaCfuUfguuGfuUfuAfaAfuscsu | 205 | |
| AD-58651.1 | A-119328.2 | AfsusUfuAfaAfcAfAfCfaAfgUfaCfcUfuUfL96 | 155 | A-119339.1 | asAfsaGfsgUfsaCfsuUfsguuGfsuUfsuAfsaAfsuscsu | 206 | |
| AD-58641.1 | A-119322.1 | UfsgsAfcAfaAfaUfAfAfcUfcAfcUfaUfaAfL96 | 156 | A-119323.1 | usUfsaUfaGfuGfaGfuuaUfuUfuGfuCfasasu | 207 | |
| AD-58648.1 | A-119322.2 | UfsgsAfcAfaAfaUfAfAfcUfcAfcUfaUfaAfL96 | 157 | A-119336.1 | usUfsaUfsaGfsuGfsaGfsuuaUfsuUfsuGfsuCfsasasu | 208 | |
| AD-58642.1 | A-119324.1 | GfsasCfaAfaAfuAfAfCfuCfaCfuAfuAfaUfL96 | 158 | A-119325.1 | asUfsuAfuAfgUfgAfguuAfuUfuUfgUfcsasa | 209 | |
| AD-58649.1 | A-119324.2 | GfsasCfaAfaAfuAfAfCfuCfaCfuAfuAfaUfL96 | 159 | A-119337.1 | asUfsuAfsuAfsgUfsgAfsguuAfsuUfsuUfsgUfscsasa | 210 | |
| AD-58647.1 | A-119334.1 | GfsusUfcCfgGfaUfAfUfuUfgAfaCfuUfuUfL96 | 160 | A-119335.1 | asAfsaAfgUfuCfaAfauaUfcCfgGfaAfcscsg | 211 | |
| AD-58654.1 | A-119334.2 | GfsusUfcCfgGfaUfAfUfuUfgAfaCfuUfuUfL96 | 161 | A-119342.1 | asAfsaAfsgUfsuCfsaAfsauaUfscCfsgGfsaAfscscsg | 212 | |
| AD-58645.1 | A-119330.1 | UfsgsCfaGfaUfcAfAfAfcAfcAfaUfuUfcAfL96 | 162 | A-119331.1 | usGfsaAfaUfuGfuGfuuuGfaUfcUfgCfasgsa | 213 | |
| AD-58652.1 | A-119330.2 | UfsgsCfaGfaUfcAfAfAfcAfcAfaUfuUfcAfL96 | 163 | A-119340.1 | usGfsaAfsaUfsuGfsuGfsuuuGfsaUfscUfsgCfsasgsa | 214 | |
| AD-58643.1 | A-119326.1 | AfsasGfcAfaGfaUfAfUfuUfuUfaUfaAfuAfL96 | 164 | A-119327.1 | usAfsuUfaUfaAfaAfauaUfcUfuGfcUfususu | 215 | |
| AD-58650.1 | A-119326.2 | AfsasGfcAfaGfaUfAfUfuUfuUfaUfaAfuAfL96 | 165 | A-119338.1 | usAfsuUfsaUfsaAfsaAfsauaUfscUfsuGfscUfsususu | 216 | |
| AD-58646.1 | A-119332.1 | CfsasGfaUfcAfaAfCfAfcAfaUfuUfcAfgUfL96 | 166 | A-119333.1 | asCfsuGfaAfaUfuGfuguUfuGfaUfcUfgscsa | 217 | |
| AD-58653.1 | A-119332.2 | CfsasGfaUfcAfaAfCfAfcAfaUfuUfcAfgUfL96 | 167 | A-119341.1 | asCfsuGfsaAfsaUfsuGfsuguUfsuGfsaUfscUfsgscsa | 218 | |

⁴The Species Oligo name and the position in the nucleotide sequence of the GenBank record that the antisense strand targets correspond to those shown in Table 3.

TABLE 5
Unmodified Sense and Antisense Strand Sequences of C5 dsRNAs

| Duplex ID | Sense strand | Sense Unmodified Sequence | SEQ ID NO: | Antisense | Antisense Unmodified Sequence | SEQ ID NO: | Species_Oligo name |
|---|---|---|---|---|---|---|---|
| AD-58143.1 UM | A-118423.1 | CACUAUAAUUACUUGAUUU | 219 | A-118424.1 | AAAUCAAGUAAUUAUAGUG | 302 | NM_001735.2_1522-1540_as |
| AD-58149.1 UM | A-118425.1 | UAACUCACUAUAAUUACUU | 220 | A-118426.1 | AAGUAAUUAUAGUGAGUUA | 303 | NM_001735.2_1517-1535_as |
| AD-58155.1 UM | A-118427.1 | ACAAAAUAACUCACUAUAA | 221 | A-118428.1 | UUAUAGUGAGUUAUUUUGU | 304 | NM_001735.2_1511-1529_as |
| AD-58161.1 UM | A-118429.1 | UCCUCUGGAAAUUGGCCUU | 222 | A-118430.1 | AAGGCCAAUUUCCAGAGGA | 305 | NM_001735.2_2733-2751_as |
| AD-58167.1 UM | A-118431.1 | CAAAAUAACUCACUAUAAU | 223 | A-118432.1 | AUUAUAGUGAGUUAUUUUG | 306 | NM_001735.2_1512-1530_as |
| AD-58173.1 UM | A-118433.1 | CUCUGGAAAUUGGCCUUCA | 224 | A-118434.1 | UGAAGGCCAAUUUCCAGAG | 307 | NM_001735.2_2735-2753_as |
| AD-58179.1 UM | A-118435.1 | GCAAGAUAUUUUUAUAAUA | 225 | A-118436.1 | UAUUAUAAAAAUAUCUUGC | 308 | NM_001735.2_784-802_as |
| AD-58185.1 UM | A-118437.1 | AAUGUUUUUGUCAAGUACA | 226 | A-118438.1 | UGUACUUGACAAAAACAUU | 309 | NM_001735.2_4744-4762_as |
| AD-58144.1 UM | A-118439.1 | UUAAACAACAAGUACCUUU | 227 | A-118440.1 | AAAGGUACUUGUUGUUUAA | 310 | NM_001735.2_982-1000_as |
| AD-58150.1 UM | A-118441.1 | UCAGAAAGUCUGUGAAGGA | 228 | A-118442.1 | UCCUUCACAGACUUUCUGA | 311 | NM_001735.2_4578-4596_as |
| AD-58156.1 UM | A-118443.1 | ACUGAAGCAUUUGAUGCAA | 229 | A-118444.1 | UUGCAUCAAAUGCUUCAGU | 312 | NM_001735.2_169-187_as |
| AD-58162.1 UM | A-118445.1 | AGUUCUGUGUUAAAAUGUC | 230 | A-118446.1 | GACAUUUUAACACAGAACU | 313 | NM_001735.2_2591-2609_as |
| AD-58168.1 UM | A-118447.1 | GAUUUUGAGUGUAAAAGGA | 231 | A-118448.1 | UCCUUUUACACUCAAAAUC | 314 | NM_001735.2_2955-2973_as |
| AD-58174.1 UM | A-118449.1 | UGAUGAACCUUGUAAAGAA | 232 | A-118450.1 | UUCUUUACAAGGUUCAUCA | 315 | NM_001735.2_2025-2043_as |
| AD-58180.1 UM | A-118451.1 | CAUUGGAACAUUUUUCAUU | 233 | A-118452.1 | AAUGAAAAAUGUUCCAAUG | 316 | NM_001735.2_3118-3136_as |
| AD-58186.1 UM | A-118453.1 | CCAGAAAUUCGGAGUUAUU | 234 | A-118454.1 | AAUAACUCCGAAUUUCUGG | 317 | NM_001735.2_2317-2335_as |
| AD-58145.1 UM | A-118455.1 | CCUGGGAGAUAAAACUCAC | 235 | A-118456.1 | GUGAGUUUUAUCUCCCAGG | 318 | NM_001735.2_3618-3636_as |
| AD-58151.1 UM | A-118457.1 | AAAUGAUGAACCUUGUAAA | 236 | A-118458.1 | UUUACAAGGUUCAUCAUUU | 319 | NM_001735.2_2022-2040_as |
| AD-58157.1 UM | A-118459.1 | UGCUCAAGUCACAUUUGAU | 237 | A-118460.1 | AUCAAAUGUGACUUGAGCA | 320 | NM_001735.2_918-936_as |
| AD-58163.1 UM | A-118461.1 | GAUUGCAUAUGCUUAUAAA | 238 | A-118462.1 | UUUAUAAGCAUAUGCAAUC | 321 | NM_001735.2_4698-4716_as |
| AD-58169.1 UM | A-118463.1 | UAUCCUGAUAAAAAAUUUA | 239 | A-118464.1 | UAAAUUUUUUAUCAGGAUA | 322 | NM_001735.2_205-223_as |
| AD-58175.1 UM | A-118465.1 | GAAGUUUGCAGCUUUUAUU | 240 | A-118466.1 | AAUAAAAGCUGCAAACUUC | 323 | NM_001735.2_4147-4165_as |
| AD-58181.1 UM | A-118467.1 | AGAAAUUGAUCAUAUUGGA | 241 | A-118468.1 | UCCAAUAUGAUCAAUUUCU | 324 | NM_001735.2_555-573_as |
| AD-58187.1 UM | A-118469.1 | CCUGAUAAAAAAUUUAGUU | 242 | A-118470.1 | AACUAAAUUUUUUAUCAGG | 325 | NM_001735.2_208-226_as |
| AD-58146.1 UM | A-118471.1 | GAAAAGAAAUCUUAGUAAA | 243 | A-118472.1 | UUUACUAAGAUUUCUUUUC | 326 | NM_001735.2_2786-2804_as |
| AD-58152.1 UM | A-118473.1 | UUAUCAAAGUAUAAACAUU | 244 | A-118474.1 | AAUGUUUAUACUUUGAUAA | 327 | NM_001735.2_1596-1614_as |
| AD-58158.1 UM | A-118475.1 | CCUACAAACUGAAUUUGGU | 245 | A-118476.1 | ACCAAAUUCAGUUUGUAGG | 328 | NM_001735.2_1082-1100_as |
| AD-58164.1 UM | A-118477.1 | GGAGCAAACAUAUGUCAUU | 246 | A-118478.1 | AAUGACAUAUGUUUGCUCC | 329 | NM_001735.2_87-105_as |
| AD-58170.1 UM | A-118479.1 | AUGUAACAACUGUAGUUCA | 247 | A-118480.1 | UGAACUACAGUUGUUACAU | 330 | NM_001735.2_4109-4127_as |
| AD-58176.1 UM | A-118481.1 | GGAAAUCAUUGGAACAUUU | 248 | A-118482.1 | AAAUGUUCCAAUGAUUUCC | 331 | NM_001735.2_3112-3130_as |
| AD-58182.1 UM | A-118483.1 | UAAGAAUUUUGAAAUUACU | 249 | A-118484.1 | AGUAAUUUCAAAAUUCUUA | 332 | NM_001735.2_759-777_as |
| AD-58188.1 UM | A-118485.1 | UUCUGCAACUGAAUUCGAU | 250 | A-118486.1 | AUCGAAUUCAGUUGCAGAA | 333 | NM_001735.2_4412-4430_as |
| AD-58147.1 UM | A-118487.1 | CCUUGGAAAGAGUAUUUCA | 251 | A-118488.1 | UGAAAUACUCUUUCCAAGG | 334 | NM_001735.2_1886-1904_as |
| AD-58153.1 UM | A-118489.1 | UGAUAAAAAAUUUAGUUAC | 252 | A-118490.1 | GUAACUAAAUUUUUUAUCA | 335 | NM_001735.2_210-228_as |
| AD-58159.1 UM | A-118491.1 | CUUGGAAAGAGUAUUUCAA | 253 | A-118492.1 | UUGAAAUACUCUUUCCAAG | 336 | NM_001735.2_1887-1905_as |
| AD-58190.1 UM | A-118519.1 | CACUAUAAUUACUUGAUUU | 254 | A-118520.1 | AAAUCAAGUAAUUAUAGUG | 337 | NM_001735.2_1522-1540_as |
| AD-58196.1 UM | A-118521.1 | UAACUCACUAUAAUUACUU | 255 | A-118522.1 | AAGUAAUUAUAGUGAGUUA | 338 | NM_001735.2_1517-1535_as |
| AD-58202.1 UM | A-118523.1 | ACAAAAUAACUCACUAUAA | 256 | A-118524.1 | UUAUAGUGAGUUAUUUUGU | 339 | NM_001735.2_1511-1529_as |
| AD-58208.1 UM | A-118525.1 | UCCUCUGGAAAUUGGCCUU | 257 | A-118526.1 | AAGGCCAAUUUCCAGAGGA | 340 | NM_001735.2_2733-2751_as |
| AD-58214.1 UM | A-118527.1 | CAAAAUAACUCACUAUAAU | 258 | A-118528.1 | AUUAUAGUGAGUUAUUUUG | 341 | NM_001735.2_1512-1530_as |
| AD-58220.1 UM | A-118529.1 | CUCUGGAAAUUGGCCUUCA | 259 | A-118530.1 | UGAAGGCCAAUUUCCAGAG | 342 | NM_001735.2_2735-2753_as |
| AD-58226.1 UM | A-118531.1 | GCAAGAUAUUUUUAUAAUA | 260 | A-118532.1 | UAUUAUAAAAAUAUCUUGC | 343 | NM_001735.2_784-802_as |
| AD-58231.1 UM | A-118533.1 | AAUGUUUUUGUCAAGUACA | 261 | A-118534.1 | UGUACUUGACAAAAACAUU | 344 | NM_001735.2_4744-4762_as |
| AD-58191.1 UM | A-118535.1 | UUAAACAACAAGUACCUUU | 262 | A-118536.1 | AAAGGUACUUGUUGUUUAA | 345 | NM_001735.2_982-1000_as |
| AD-58197.1 UM | A-118537.1 | UCAGAAAGUCUGUGAAGGA | 263 | A-118538.1 | UCCUUCACAGACUUUCUGA | 346 | NM_001735.2_4578-4596_as |
| AD-58203.1 UM | A-118539.1 | ACUGAAGCAUUUGAUGCAA | 264 | A-118540.1 | UUGCAUCAAAUGCUUCAGU | 347 | NM_001735.2_169-187_as |
| AD-58209.1 UM | A-118541.1 | AGUUCUGUGUUAAAAUGUC | 265 | A-118542.1 | GACAUUUUAACACAGAACU | 348 | NM_001735.2_2591-2609_as |
| AD-58233.1 UM | A-118565.1 | CACUAUAAUUACUUGAUUU | 266 | A-118566.1 | AAAUCAAGUAAUUAUAGUG | 349 | NM_001735.2_1522-1540_as |
| AD-58193.1 UM | A-118567.1 | UAACUCACUAUAAUUACUU | 267 | A-118568.1 | AAGUAAUUAUAGUGAGUUA | 350 | NM_001735.2_1517-1535_as |
| AD-58199.1 UM | A-118569.1 | ACAAAAUAACUCACUAUAA | 268 | A-118570.1 | UUAUAGUGAGUUAUUUUGU | 351 | NM_001735.2_1511-1529_as |
| AD-58205.1 UM | A-118571.1 | UCCUCUGGAAAUUGGCCUU | 269 | A-118572.1 | AAGGCCAAUUUCCAGAGGA | 352 | NM_001735.2_2733-2751_as |
| AD-58211.1 UM | A-118573.1 | CAAAAUAACUCACUAUAAU | 270 | A-118574.1 | AUUAUAGUGAGUUAUUUUG | 353 | NM_001735.2_1512-1530_as |
| AD-58217.1 UM | A-118575.1 | CUCUGGAAAUUGGCCUUCA | 271 | A-118576.1 | UGAAGGCCAAUUUCCAGAG | 354 | NM_001735.2_2735-2753_as |
| AD-58223.1 UM | A-118577.1 | GCAAGAUAUUUUUAUAAUA | 272 | A-118578.1 | UAUUAUAAAAAUAUCUUGC | 355 | NM_001735.2_784-802_as |
| AD-58229.1 UM | A-118579.1 | AAUGUUUUUGUCAAGUACA | 273 | A-118580.1 | UGUACUUGACAAAAACAUU | 356 | NM_001735.2_4744-4762_as |
| AD-58234.1 UM | A-118581.1 | UUAAACAACAAGUACCUUU | 274 | A-118582.1 | AAAGGUACUUGUUGUUUAA | 357 | NM_001735.2_982-1000_as |
| AD-58194.1 UM | A-118583.1 | UCAGAAAGUCUGUGAAGGA | 275 | A-118584.1 | UCCUUCACAGACUUUCUGA | 358 | NM_001735.2_4578-4596_as |
| AD-58200.1 UM | A-118585.1 | ACUGAAGCAUUUGAUGCAA | 276 | A-118586.1 | UUGCAUCAAAUGCUUCAGU | 359 | NM_001735.2_169-187_as |
| AD-58206.1 UM | A-118587.1 | AGUUCUGUGUUAAAAUGUC | 277 | A-118588.1 | GACAUUUUAACACAGAACU | 360 | NM_001735.2_2591-2609_as |
| AD-58236.1 UM | A-118423.2 | CACUAUAAUUACUUGAUUU | 278 | A-118644.1 | AAAUCAAGUAAUUAUAGUG | 361 | NM_001735.2_1522-1540_as |
| AD-58242.1 UM | A-118425.2 | UAACUCACUAUAAUUACUU | 279 | A-118645.1 | AAGUAAUUAUAGUGAGUUA | 362 | NM_001735.2_1517-1535_as |
| AD-58248.1 UM | A-118427.2 | ACAAAAUAACUCACUAUAA | 280 | A-118646.1 | UUAUAGUGAGUUAUUUUGU | 363 | NM_001735.2_1511-1529_as |
| AD-58254.1 UM | A-118429.2 | UCCUCUGGAAAUUGGCCUU | 281 | A-118647.1 | AAGGCCAAUUUCCAGAGGA | 364 | NM_001735.2_2733-2751_as |
| AD-58260.1 UM | A-118431.2 | CAAAAUAACUCACUAUAAU | 282 | A-118648.1 | AUUAUAGUGAGUUAUUUUG | 365 | NM_001735.2_1512-1530_as |
| AD-58266.1 UM | A-118433.2 | CUCUGGAAAUUGGCCUUCA | 283 | A-118649.1 | UGAAGGCCAAUUUCCAGAG | 366 | NM_001735.2_2735-2753_as |
| AD-58272.1 UM | A-118435.2 | GCAAGAUAUUUUUAUAAUA | 284 | A-118650.1 | UAUUAUAAAAAUAUCUUGC | 367 | NM_001735.2_784-802_as |
| AD-58277.1 UM | A-118437.2 | AAUGUUUUUGUCAAGUACA | 285 | A-118651.1 | UGUACUUGACAAAAACAUU | 368 | NM_001735.2_4744-4762_as |
| AD-58237.1 UM | A-118439.2 | UUAAACAACAAGUACCUUU | 286 | A-118652.1 | AAAGGUACUUGUUGUUUAA | 369 | NM_001735.2_982-1000_as |
| AD-58243.1 UM | A-118441.2 | UCAGAAAGUCUGUGAAGGA | 287 | A-118653.1 | UCCUUCACAGACUUUCUGA | 370 | NM_001735.2_4578-4596_as |
| AD-58249.1 UM | A-118443.2 | ACUGAAGCAUUUGAUGCAA | 288 | A-118654.1 | UUGCAUCAAAUGCUUCAGU | 371 | NM_001735.2_169-187_as |
| AD-58255.1 UM | A-118445.2 | AGUUCUGUGUUAAAAUGUC | 289 | A-118655.1 | GACAUUUUAACACAGAACU | 372 | NM_001735.2_2591-2609_as |
| AD-58279.1 UM | A-118423.3 | CACUAUAAUUACUUGAUUU | 290 | A-118667.1 | AAAUCAAGUAAUUAUAGUG | 373 | NM_001735.2_1522-1540_as |
| AD-58239.1 UM | A-118425.3 | UAACUCACUAUAAUUACUU | 291 | A-118668.1 | AAGUAAUUAUAGUGAGUUA | 374 | NM_001735.2_1517-1535_as |
| AD-58245.1 UM | A-118427.3 | ACAAAAUAACUCACUAUAA | 292 | A-118669.1 | UUAUAGUGAGUUAUUUUGU | 375 | NM_001735.2_1511-1529_as |
| AD-58251.1 UM | A-118429.3 | UCCUCUGGAAAUUGGCCUU | 293 | A-118670.1 | AAGGCCAAUUUCCAGAGGA | 376 | NM_001735.2_2733-2751_as |
| AD-58257.1 UM | A-118431.3 | CAAAAUAACUCACUAUAAU | 294 | A-118671.1 | AUUAUAGUGAGUUAUUUUG | 377 | NM_001735.2_1512-1530_as |
| AD-58263.1 UM | A-118433.3 | CUCUGGAAAUUGGCCUUCA | 295 | A-118672.1 | UGAAGGCCAAUUUCCAGAG | 378 | NM_001735.2_2735-2753_as |
| AD-58269.1 UM | A-118435.3 | GCAAGAUAUUUUUAUAAUA | 296 | A-118673.1 | UAUUAUAAAAAUAUCUUGC | 379 | NM_001735.2_784-802_as |
| AD-58275.1 UM | A-118437.3 | AAUGUUUUUGUCAAGUACA | 297 | A-118674.1 | UGUACUUGACAAAAACAUU | 380 | NM_001735.2_4744-4762_as |
| AD-58280.1 UM | A-118439.3 | UUAAACAACAAGUACCUUU | 298 | A-118675.1 | AAAGGUACUUGUUGUUUAA | 381 | NM_001735.2_982-1000_as |
| AD-58240.1 UM | A-118441.3 | UCAGAAAGUCUGUGAAGGA | 299 | A-118676.1 | UCCUUCACAGACUUUCUGA | 382 | NM_001735.2_4578-4596_as |
| AD-58246.1 UM | A-118443.3 | ACUGAAGCAUUUGAUGCAA | 300 | A-118677.1 | UUGCAUCAAAUGCUUCAGU | 383 | NM_001735.2_169-187_as |
| AD-58252.1 UM | A-118445.3 | AGUUCUGUGUUAAAAUGUC | 301 | A-118678.1 | GACAUUUUAACACAGAACU | 384 | NM_001735.2_2591-2609_as |

TABLE 6
Modified Sense and Antisense Strand Sequences of C5 dsRNAs

| | | | | | | | Species_Oligo |
|---|---|---|---|---|---|---|---|
| Duplex ID | Sense strand | Sense sequence | SEQ ID NO: | Antisense | Antisense sequence | SEQ ID NO: | name⁵ |
| AD-58143.1 | A-118423.1 | cAcuAuAAuuAcuuGAuuudTsdT | 385 | A-118424.1 | AAAUcAAGuAAUuAuAGUGdTsdT | 468 | |
| AD-58149.1 | A-118425.1 | uAAcucAcuAuAAuuAcuudTsdT | 386 | A-118426.1 | AAGuAAUuAuAGUGAGUuAdTsdT | 469 | |
| AD-58155.1 | A-118427.1 | AcAAAAuAAcucAcuAuAAdTsdT | 387 | A-118428.1 | UuAuAGUGAGUuAUUUUGUdTsdT | 470 | |
| AD-58161.1 | A-118429.1 | uccucuGGAAAuuGGccuudTsdT | 388 | A-118430.1 | AAGGCcAAUUUCcAGAGGAdTsdT | 471 | |
| AD-58167.1 | A-118431.1 | cAAAAuAAcucAcuAuAAudTsdT | 389 | A-118432.1 | AUuAuAGUGAGUuAUUUUGdTsdT | 472 | |
| AD-58173.1 | A-118433.1 | cucuGGAAAuuGGccuucAdTsdT | 390 | A-118434.1 | UGAAGGCcAAUUUCcAGAGdTsdT | 473 | |
| AD-58179.1 | A-118435.1 | GcAAGAuAuuuuuAuAAuAdTsdT | 391 | A-118436.1 | uAUuAuAAAAAuAUCUUGCdTsdT | 474 | |
| AD-58185.1 | A-118437.1 | AAuGuuuuuGucAAGuAcAdTsdT | 392 | A-118438.1 | UGuACUUGAcAAAAAcAUUdTsdT | 475 | |
| AD-58144.1 | A-118439.1 | uuAAAcAAcAAGuAccuuudTsdT | 393 | A-118440.1 | AAAGGuACUUGUUGUUuAAdTsdT | 476 | |
| AD-58150.1 | A-118441.1 | ucAGAAAGucuGuGAAGGAdTsdT | 394 | A-118442.1 | UCCUUcAcAGACUUUCUGAdTsdT | 477 | |
| AD-58156.1 | A-118443.1 | AcuGAAGcAuuuGAuGcAAdTsdT | 395 | A-118444.1 | UUGcAUcAAAUGCUUcAGUdTsdT | 478 | |
| AD-58162.1 | A-118445.1 | AGuucuGuGuuAAAAuGucdTsdT | 396 | A-118446.1 | GAcAUUUuAAcAcAGAACUdTsdT | 479 | |
| AD-58168.1 | A-118447.1 | GAuuuuGAGuGuAAAAGGAdTsdT | 397 | A-118448.1 | UCCUUUuAcACUcAAAAUCdTsdT | 480 | |
| AD-58174.1 | A-118449.1 | uGAuGAAccuuGuAAAGAAdTsdT | 398 | A-118450.1 | UUCUUuAcAAGGUUcAUcAdTsdT | 481 | |
| AD-58180.1 | A-118451.1 | cAuuGGAAcAuuuuucAuudTsdT | 399 | A-118452.1 | AAUGAAAAAUGUUCcAAUGdTsdT | 482 | |
| AD-58186.1 | A-118453.1 | ccAGAAAuucGGAGuuAuudTsdT | 400 | A-118454.1 | AAuAACUCCGAAUUUCUGGdTsdT | 483 | |
| AD-58145.1 | A-118455.1 | ccuGGGAGAuAAAAcucAcdTsdT | 401 | A-118456.1 | GUGAGUUUuAUCUCCcAGGdTsdT | 484 | |
| AD-58151.1 | A-118457.1 | AAAuGAuGAAccuuGuAAAdTsdT | 402 | A-118458.1 | UUuAcAAGGUUcAUcAUUUdTsdT | 485 | |
| AD-58157.1 | A-118459.1 | uGcucAAGucAcAuuuGAudTsdT | 403 | A-118460.1 | AUcAAAUGUGACUUGAGcAdTsdT | 486 | |
| AD-58163.1 | A-118461.1 | GAuuGcAuAuGcuuAuAAAdTsdT | 404 | A-118462.1 | UUuAuAAGcAuAUGcAAUCdTsdT | 487 | |
| AD-58169.1 | A-118463.1 | uAuccuGAuAAAAAAuuuAdTsdT | 405 | A-118464.1 | uAAAUUUUUuAUcAGGAuAdTsdT | 488 | |
| AD-58175.1 | A-118465.1 | GAAGuuuGcAGcuuuuAuudTsdT | 406 | A-118466.1 | AAuAAAAGCUGcAAACUUCdTsdT | 489 | |
| AD-58181.1 | A-118467.1 | AGAAAuuGAucAuAuuGGAdTsdT | 407 | A-118468.1 | UCcAAuAUGAUcAAUUUCUdTsdT | 490 | |
| AD-58187.1 | A-118469.1 | ccuGAuAAAAAAuuuAGuudTsdT | 408 | A-118470.1 | AACuAAAUUUUUuAUcAGGdTsdT | 491 | |
| AD-58146.1 | A-118471.1 | GAAAAGAAAucuuAGuAAAdTsdT | 409 | A-118472.1 | UUuACuAAGAUUUCUUUUCdTsdT | 492 | |
| AD-58152.1 | A-118473.1 | uuAucAAAGuAuAAAcAuudTsdT | 410 | A-118474.1 | AAUGUUuAuACUUUGAuAAdTsdT | 493 | |
| AD-58158.1 | A-118475.1 | ccuAcAAAcuGAAuuuGGudTsdT | 411 | A-118476.1 | ACcAAAUUcAGUUUGuAGGdTsdT | 494 | |
| AD-58164.1 | A-118477.1 | GGAGcAAAcAuAuGucAuudTsdT | 412 | A-118478.1 | AAUGAcAuAUGUUUGCUCCdTsdT | 495 | |
| AD-58170.1 | A-118479.1 | AuGuAAcAAcuGuAGuucAdTsdT | 413 | A-118480.1 | UGAACuAcAGUUGUuAcAUdTsdT | 496 | |
| AD-58176.1 | A-118481.1 | GGAAAucAuuGGAAcAuuudTsdT | 414 | A-118482.1 | AAAUGUUCcAAUGAUUUCCdTsdT | 497 | |
| AD-58182.1 | A-118483.1 | uAAGAAuuuuGAAAuuAcudTsdT | 415 | A-118484.1 | AGuAAUUUcAAAAUUCUuAdTsdT | 498 | |
| AD-58188.1 | A-118485.1 | uucuGcAAcuGAAuucGAudTsdT | 416 | A-118486.1 | AUCGAAUUcAGUUGcAGAAdTsdT | 499 | |
| AD-58147.1 | A-118487.1 | ccuuGGAAAGAGuAuuucAdTsdT | 417 | A-118488.1 | UGAAAuACUCUUUCcAAGGdTsdT | 500 | |
| AD-58153.1 | A-118489.1 | uGAuAAAAAAuuuAGuuAcdTsdT | 418 | A-118490.1 | GuAACuAAAUUUUUuAUcAdTsdT | 501 | |
| AD-58159.1 | A-118491.1 | cuuGGAAAGAGuAuuucAAdTsdT | 419 | A-118492.1 | UUGAAAuACUCUUUCcAAGdTsdT | 502 | |
| AD-58190.1 | A-118519.1 | CACUAUAAUUACUUGAUUUdTdT | 420 | A-118520.1 | AAAUCAAGUAAUUAUAGUGdTdT | 503 | |
| AD-58196.1 | A-118521.1 | UAACUCACUAUAAUUACUUdTdT | 421 | A-118522.1 | AAGUAAUUAUAGUGAGUUAdTdT | 504 | |
| AD-58202.1 | A-118523.1 | ACAAAAUAACUCACUAUAAdTdT | 422 | A-118524.1 | UUAUAGUGAGUUAUUUUGUdTdT | 505 | |
| AD-58208.1 | A-118525.1 | UCCUCUGGAAAUUGGCCUUdTdT | 423 | A-118526.1 | AAGGCCAAUUUCCAGAGGAdTdT | 506 | |
| AD-58214.1 | A-118527.1 | CAAAAUAACUCACUAUAAUdTdT | 424 | A-118528.1 | AUUAUAGUGAGUUAUUUUGdTdT | 507 | |
| AD-58220.1 | A-118529.1 | CUCUGGAAAUUGGCCUUCAdTdT | 425 | A-118530.1 | UGAAGGCCAAUUUCCAGAGdTdT | 508 | |
| AD-58226.1 | A-118531.1 | GCAAGAUAUUUUUAUAAUAdTdT | 426 | A-118532.1 | UAUUAUAAAAAUAUCUUGCdTdT | 509 | |
| AD-58231.1 | A-118533.1 | AAUGUUUUUGUCAAGUACAdTdT | 427 | A-118534.1 | UGUACUUGACAAAAACAUUdTdT | 510 | |
| AD-58191.1 | A-118535.1 | UUAAACAACAAGUACCUUUdTdT | 428 | A-118536.1 | AAAGGUACUUGUUGUUUAAdTdT | 511 | |
| AD-58197.1 | A-118537.1 | UCAGAAAGUCUGUGAAGGAdTdT | 429 | A-118538.1 | UCCUUCACAGACUUUCUGAdTdT | 512 | |
| AD-58203.1 | A-118539.1 | ACUGAAGCAUUUGAUGCAAdTdT | 430 | A-118540.1 | UUGCAUCAAAUGCUUCAGUdTdT | 513 | |
| AD-58209.1 | A-118541.1 | AGUUCUGUGUUAAAAUGUCdTdT | 431 | A-118542.1 | GACAUUUUAACACAGAACUdTdT | 514 | |
| AD-58233.1 | A-118565.1 | CfACfUfAUfAAUfUfACfUfUfGAUfUfUfdTsdT | 432 | A-118566.1 | AAAUCfAAGUfAAUUfAUfAGUGdTsdT | 515 | |
| AD-58193.1 | A-118567.1 | UfAACfUfCfACfUfAUfAAUfUfACfUfUfdTsdT | 433 | A-118568.1 | AAGUfAAUUfAUfAGUGAGUUfAdTsdT | 516 | |
| AD-58199.1 | A-118569.1 | ACfAAAAUfAACfUfCfACfUfAUfAAdTsdT | 434 | A-118570.1 | UUfAUfAGUGAGUUfAUUUUGUdTsdT | 517 | |
| AD-58205.1 | A-118571.1 | UfCfCfUfCfUfGGAAAUfUfGGCfCfUfUfdTsdT | 435 | A-118572.1 | AAGGCCfAAUUUCCfAGAGGAdTsdT | 518 | |
| AD-58211.1 | A-118573.1 | CfAAAAUfAACfUfCfACfUfAUfAAUfdTsdT | 436 | A-118574.1 | AUUfAUfAGUGAGUUfAUUUUGdTsdT | 519 | |
| AD-58217.1 | A-118575.1 | CfUfCfUfGGAAAUfUfGGCfCfUfUfCfAdTsdT | 437 | A-118576.1 | UGAAGGCCfAAUUUCCfAGAGdTsdT | 520 | |
| AD-58223.1 | A-118577.1 | GCfAAGAUfAUfUfUfUfUfAUfAAUfAdTsdT | 438 | A-118578.1 | UfAUUfAUfAAAAAUfAUCUUGCdTsdT | 521 | |
| AD-58229.1 | A-118579.1 | AAUfGUfUfUfUfUfGUfCfAAGUfACfAdTsdT | 439 | A-118580.1 | UGUfACUUGACfAAAAACfAUUdTsdT | 522 | |
| AD-58234.1 | A-118581.1 | UfUfAAACfAACfAAGUfACfCfUfUfUfdTsdT | 440 | A-118582.1 | AAAGGUfACUUGUUGUUUfAAdTsdT | 523 | |
| AD-58194.1 | A-118583.1 | UfCfAGAAAGUfCfUfGUfGAAGGAdTsdT | 441 | A-118584.1 | UCCUUCfACfAGACUUUCUGAdTsdT | 524 | |
| AD-58200.1 | A-118585.1 | ACfUfGAAGCfAUfUfUfGAUfGCfAAdTsdT | 442 | A-118586.1 | UUGCfAUCfAAAUGCUUCfAGUdTsdT | 525 | |
| AD-58206.1 | A-118587.1 | AGUfUfCfUfGUfGUfUfAAAAUfGUfCfdTsdT | 443 | A-118588.1 | GACfAUUUUfAACfACfAGAACUdTsdT | 526 | |
| AD-58236.1 | A-118423.2 | cAcuAuAAuuAcuuGAuuudTsdT | 444 | A-118644.1 | AAAUcAAGuAAUuAuAGuGdTsdT | 527 | |
| AD-58242.1 | A-118425.2 | uAAcucAcuAuAAuuAcuudTsdT | 445 | A-118645.1 | AAGuAAUuAuAGuGAGUuAdTsdT | 528 | |
| AD-58248.1 | A-118427.2 | AcAAAAuAAcucAcuAuAAdTsdT | 446 | A-118646.1 | UuAuAGuGAGUuAuUuuGUdTsdT | 529 | |
| AD-58254.1 | A-118429.2 | uccucuGGAAAuuGGccuudTsdT | 447 | A-118647.1 | AAGGCcAAuUUCcAGAGGAdTsdT | 530 | |
| AD-58260.1 | A-118431.2 | cAAAAuAAcucAcuAuAAudTsdT | 448 | A-118648.1 | AUuAuAGuGAGUuAuUuuGdTsdT | 531 | |
| AD-58266.1 | A-118433.2 | cucuGGAAAuuGGccuucAdTsdT | 449 | A-118649.1 | uGAAGGCcAAuUUCcAGAGdTsdT | 532 | |
| AD-58272.1 | A-118435.2 | GcAAGAuAuuuuuAuAAuAdTsdT | 450 | A-118650.1 | uAUuAuAAAAAuAUCuuGCdTsdT | 533 | |
| AD-58277.1 | A-118437.2 | AAuGuuuuuGucAAGuAcAdTsdT | 451 | A-118651.1 | uGuACuuGAcAAAAAcAuUdTsdT | 534 | |
| AD-58237.1 | A-118439.2 | uuAAAcAAcAAGuAccuuudTsdT | 452 | A-118652.1 | AAAGGuACuuGuuGuUuAAdTsdT | 535 | |
| AD-58243.1 | A-118441.2 | ucAGAAAGucuGuGAAGGAdTsdT | 453 | A-118653.1 | UCCuUcAcAGACuUUCuGAdTsdT | 536 | |
| AD-58249.1 | A-118443.2 | AcuGAAGcAuuuGAuGcAAdTsdT | 454 | A-118654.1 | uuGcAUcAAAuGCuUcAGUdTsdT | 537 | |
| AD-58255.1 | A-118445.2 | AGuucuGuGuuAAAAuGucdTsdT | 455 | A-118655.1 | GAcAuUUuAAcAcAGAACUdTsdT | 538 | |
| AD-58279.1 | A-118423.3 | cAcuAuAAuuAcuuGAuuudTsdT | 456 | A-118667.1 | AAAUCAAGuAAuuAuAgugdTsdT | 539 | |
| AD-58239.1 | A-118425.3 | uAAcucAcuAuAAuuAcuudTsdT | 457 | A-118668.1 | AAGuAAuUAuAGuGAGuuadTsdT | 540 | |
| AD-58245.1 | A-118427.3 | AcAAAAuAAcucAcuAuAAdTsdT | 458 | A-118669.1 | UuAuAGuGAGuuAuuuugudTsdT | 541 | |
| AD-58251.1 | A-118429.3 | uccucuGGAAAuuGGccuudTsdT | 459 | A-118670.1 | AAGGCCAAuUuCCAGAggadTsdT | 542 | |
| AD-58257.1 | A-118431.3 | cAAAAuAAcucAcuAuAAudTsdT | 460 | A-118671.1 | AuUAuAGuGAGuuAuuuugdTsdT | 543 | |
| AD-58263.1 | A-118433.3 | cucuGGAAAuuGGccuucAdTsdT | 461 | A-118672.1 | UGAAGGCCAAuuuCCAgagdTsdT | 544 | |
| AD-58269.1 | A-118435.3 | GcAAGAuAuuuuuAuAAuAdTsdT | 462 | A-118673.1 | UAuUAuAAAAAuAuCuugcdTsdT | 545 | |
| AD-58275.1 | A-118437.3 | AAuGuuuuuGucAAGuAcAdTsdT | 463 | A-118674.1 | UGuACuUGACAAAAACauudTsdT | 546 | |
| AD-58280.1 | A-118439.3 | uuAAAcAAcAAGuAccuuudTsdT | 464 | A-118675.1 | AAAGGuACuUGuuGuuuaadTsdT | 547 | |
| AD-58240.1 | A-118441.3 | ucAGAAAGucuGuGAAGGAdTsdT | 465 | A-118676.1 | UCCuUCACAGACuuuCugadTsdT | 548 | |
| AD-58246.1 | A-118443.3 | AcuGAAGcAuuuGAuGcAAdTsdT | 466 | A-118677.1 | UuGCAUCAAAuGCuuCagudTsdT | 549 | |
| AD-58252.1 | A-118445.3 | AGuucuGuGuuAAAAuGucdTsdT | 467 | A-118678.1 | GACAuUuUAACACAGAacudTsdT | 550 | |

⁵The Species Oligo name and the position in the nucleotide sequence of the GenBank record that the antisense strand targets correspond to those shown in Table 5.

TABLE 7
C5 single dose screen in Hep3B cells with GalNAC conjugated iRNAs

| | 10 nM | 0.1 nM | 10 nM | 0.1 nM |
|---|---|---|---|---|
| Duplex ID | AVG | AVG | STDEV | STDEV |
| AD-58093.1 | 15.62 | 21.60 | 7.48 | 6.52 |
| AD-58099.1 | 9.07 | 14.70 | 1.18 | 4.65 |
| AD-58105.1 | 36.71 | 60.23 | 5.07 | 19.83 |
| AD-58111.1 | 11.83 | 22.78 | 3.51 | 12.75 |
| AD-58117.1 | 12.43 | 33.46 | 2.00 | 23.56 |
| AD-58123.1 | 8.05 | 15.18 | 2.89 | 7.94 |
| AD-58129.1 | 10.77 | 40.06 | 1.30 | 19.66 |
| AD-58088.1 | 6.55 | 16.40 | 1.24 | 4.58 |
| AD-58094.1 | 19.59 | 40.68 | 7.64 | 12.30 |
| AD-58100.1 | 10.92 | 20.12 | 0.74 | 8.38 |
| AD-58106.1 | 10.97 | 37.23 | 2.49 | 19.95 |
| AD-58112.1 | 13.24 | 29.32 | 2.90 | 14.08 |
| AD-58118.1 | 6.63 | 15.23 | 0.54 | 5.72 |
| AD-58124.1 | 7.17 | 13.00 | 1.44 | 6.48 |
| AD-58130.1 | 10.38 | 17.92 | 2.36 | 6.92 |
| AD-58089.1 | 8.81 | 30.67 | 2.91 | 10.53 |
| AD-58095.1 | 8.72 | 14.66 | 1.04 | 3.37 |
| AD-58101.1 | 8.17 | 19.36 | 1.30 | 5.69 |
| AD-58107.1 | 4.84 | 18.10 | 1.66 | 7.21 |
| AD-58113.1 | 8.78 | 14.62 | 1.77 | 7.89 |
| AD-58119.1 | 8.90 | 15.01 | 0.91 | 7.35 |
| AD-58125.1 | 11.13 | 17.04 | 2.61 | 9.03 |
| AD-58131.1 | 13.50 | 40.14 | 1.08 | 12.07 |
| AD-58090.1 | 7.90 | 21.57 | 2.95 | 6.61 |
| AD-58096.1 | 8.02 | 16.56 | 1.54 | 6.68 |
| AD-58102.1 | 12.40 | 27.93 | 1.83 | 11.78 |
| AD-58108.1 | 12.02 | 15.07 | 2.88 | 5.74 |
| AD-58114.1 | 11.86 | 25.05 | 1.48 | 9.46 |
| AD-58120.1 | 7.65 | 10.57 | 0.58 | 3.56 |
| AD-58126.1 | 8.45 | 15.39 | 2.08 | 7.42 |
| AD-58132.1 | 8.50 | 19.26 | 2.52 | 9.38 |
| AD-58091.1 | 8.68 | 18.05 | 2.95 | 6.62 |
| AD-58097.1 | 9.31 | 23.02 | 0.67 | 10.10 |
| AD-58103.1 | 8.53 | 17.23 | 2.90 | 7.27 |
| AD-1955 | 57.41 | 81.16 | 10.76 | 5.29 |
| Mock | 78.61 | 75.97 | 5.70 | 2.76 |
| Untreated | 100 | 100 | 6.13 | 5.98 |

TABLE 8
C5 single dose transfection screen in primary mouse hepatocytes with
GalNAC conjugated iRNAs

| | 10 nM | 0.1 nM | 10 nM | 0.1 nM |
|---|---|---|---|---|
| Duplex ID | AVG | AVG | STDEV | STDEV |
| AD-58093.1 | 1.53 | 1.65 | 0.17 | 0.25 |
| AD-58099.1 | 1.65 | 1.50 | 0.61 | 0.22 |
| AD-58105.1 | 11.20 | 46.95 | 0.08 | 3.89 |
| AD-58111.1 | 2.49 | 2.13 | 0.26 | 0.20 |
| AD-58117.1 | 3.57 | 31.91 | 0.93 | 0.62 |
| AD-58123.1 | 4.29 | 2.97 | 0.11 | 2.22 |
| AD-58129.1 | 1.19 | 8.53 | 0.23 | 0.72 |
| AD-58088.1 | 0.84 | 1.34 | 0.68 | 0.07 |
| AD-58094.1 | 11.34 | 66.82 | 0.17 | 3.01 |
| AD-58100.1 | 2.78 | 1.51 | 0.43 | 0.33 |
| AD-58106.1 | 6.79 | 52.91 | 4.42 | 6.78 |
| AD-58121.1 | 1.94 | 2.15 | 0.04 | 0.91 |
| AD-58133.1 | 1.74 | 3.25 | 0.19 | 1.64 |
| AD-58116.1 | 1.76 | 2.21 | 1.27 | 0.78 |
| AD-1955 | 87.39 | 91.71 | 5.77 | 4.68 |
| Mock | 79.67 | 89.02 | 1.51 | 3.91 |
| Untreated | 100 | 100 | 6.39 | 13.11 |

TABLE 9
C5 single dose screen in primary Cynomolgus hepatocytes with GalNAC
conjugated iRNAs

| | 500 nM | 5 nM | 500 nM | 5 nM |
|---|---|---|---|---|
| Duplex ID | AVG | AVG | STDEV | STDEV |
| AD-58093.1 | 63.94 | 83.09 | 2.14 | 12.65 |
| AD-58099.1 | 61.34 | 85.85 | 12.32 | 21.95 |
| AD-58105.1 | 91.98 | 97.57 | 6.09 | 11.48 |
| AD-58111.1 | 71.27 | 92.28 | 1.93 | 12.72 |
| AD-58117.1 | 73.42 | 88.82 | 3.24 | 11.08 |
| AD-58123.1 | 75.14 | 73.06 | 7.72 | 9.71 |
| AD-58129.1 | 81.66 | 90.62 | 2.13 | 4.77 |
| AD-58088.1 | 53.63 | 87.03 | 5.93 | 19.86 |
| AD-58094.1 | 89.62 | 93.65 | 0.87 | 14.76 |
| AD-58100.1 | 79.56 | 96.70 | 4.31 | 1.10 |
| AD-58106.1 | 116.24 | 125.99 | 14.28 | 40.65 |
| AD-58112.1 | 97.19 | 107.81 | N/A | 3.13 |
| AD-58118.1 | 67.40 | 97.38 | 5.28 | 22.64 |
| AD-58124.1 | 58.04 | 96.14 | 8.72 | 10.64 |
| AD-58130.1 | 84.19 | 88.65 | 10.50 | 4.34 |
| AD-58089.1 | 83.83 | 83.44 | 1.91 | 12.26 |
| AD-58095.1 | 58.53 | 78.02 | 15.07 | 12.45 |
| AD-58101.1 | 76.68 | 76.73 | 3.95 | 6.35 |
| AD-58107.1 | 57.37 | 86.78 | 14.71 | 2.99 |
| AD-58113.1 | 37.79 | 71.10 | 8.27 | 7.76 |
| AD-58119.1 | 36.77 | 83.16 | 3.42 | 9.66 |
| AD-58125.1 | 72.40 | 96.53 | 4.46 | 4.96 |
| AD-58131.1 | 95.58 | 101.69 | 10.17 | 2.21 |
| AD-58090.1 | 56.37 | 75.00 | 3.21 | 4.97 |
| AD-58096.1 | 44.33 | 57.99 | 11.46 | 25.17 |
| AD-58102.1 | 95.46 | 89.35 | 0.83 | 1.76 |
| AD-58108.1 | 41.54 | 56.41 | 8.41 | 0.14 |
| AD-58114.1 | 88.32 | 101.88 | 20.02 | 30.29 |
| AD-58120.1 | 37.34 | 56.41 | 0.73 | 2.14 |
| AD-58126.1 | 84.97 | 105.90 | 2.39 | 7.96 |
| AD-58132.1 | 81.55 | 85.12 | 12.93 | 8.94 |
| AD-58091.1 | 78.88 | 84.60 | 44.66 | 17.40 |
| AD-58097.1 | 106.06 | 98.16 | 13.74 | 3.14 |
| AD-58103.1 | 57.21 | 89.46 | 6.40 | 5.93 |
| Untreated | 100 | 100 | 8.77 | 10.33 |

TABLE 10
C5 single dose free uptake screen in primary mouse hepatocytes with
GalNAC conjugated iRNAs

| | 500 nM | 5 nM | 500 nM | 5 nM |
|---|---|---|---|---|
| Duplex ID | AVG | AVG | STDEV | STDEV |
| AD-58093.1 | 31.62 | 64.91 | 7.13 | 8.39 |
| AD-58099.1 | 9.46 | 29.63 | 1.29 | 5.66 |
| AD-58105.1 | 84.77 | 96.41 | 5.22 | 1.89 |
| AD-58111.1 | 17.35 | 50.95 | 1.21 | 3.16 |
| AD-58117.1 | 94.95 | 139.52 | 15.43 | 43.39 |
| AD-58123.1 | 13.07 | 44.58 | 2.11 | 3.49 |
| AD-58129.1 | 68.87 | 85.04 | 2.62 | 4.42 |
| AD-58088.1 | 17.61 | 48.22 | 2.22 | 3.40 |
| AD-58094.1 | 95.92 | 104.23 | 4.16 | 6.53 |
| AD-58100.1 | 34.92 | 61.71 | 1.30 | 2.15 |
| AD-58106.1 | 85.26 | 107.53 | 2.30 | 3.38 |
| AD-58121.1 | 12.88 | 43.76 | 1.41 | 1.28 |
| AD-58133.1 | 20.97 | 42.76 | 0.24 | 0.11 |
| AD-58116.1 | 8.35 | 38.04 | 1.35 | 1.40 |
| Untreated | 100.00 | 100.00 | 3.85 | 4.38 |

TABLE 11
IC₅₀ data in primary Cynomolgus hepatocytes with GalNAC
conjugated iRNAs

| Duplex ID | IC₅₀ (nM) | STDEV |
|---|---|---|
| AD-58099.1 | 3.131 | 1.141 |
| AD-58111.1 | 12.750 | 5.280 |
| AD-58123.1 | 0.679 | 7.587 |
| AD-58088.1 | 0.218 | 3.487 |
| AD-58113.1 | 7.296 | 3.540 |
| AD-58119.1 | 33.240 | 14.740 |
| AD-58096.1 | 10.380 | 4.199 |
| AD-58108.1 | 0.953 | 10.080 |
| AD-58120.1 | 36.170 | 88.070 |

TABLE 12
IC₅₀ data in primary mouse hepatocytes with GalNAC conjugated iRNAs

| Duplex ID | IC₅₀ (nM) | STDEV |
|---|---|---|
| AD-58099 | 3.777 | 0.122 |
| AD-58111 | 0.622 | 2.421 |
| AD-58123 | 0.549 | 1.626 |
| AD-58088 | 9.513 | 2.588 |
| AD-58121 | 2.169 | 1.176 |
| AD-58133 | 3.802 | 1.006 |
| AD-58116 | 2.227 | 0.604 |
| AD-58644.1 | 4.596 | 0.3506 |
| AD-58651.1 | 59.76 | 51.99 |
| AD-58641.1 | 0.82 | 0.2618 |
| AD-58648.1 | 7.031 | 1.256 |
| AD-58642.1 | 0.5414 | 0.7334 |
| AD-58649.1 | 3.32 | 4.922 |
| AD-58647.1 | 1.356 | 0.5215 |
| AD-58654.1 | 2.09 | 0.8338 |
| AD-58645.1 | 2.944 | 0.3315 |
| AD-58652.1 | 5.316 | 2.477 |
| AD-58643.1 | 2.179 | 1.112 |
| AD-58650.1 | 8.223 | 3.76 |
| AD-58646.1 | 2.581 | 0.8186 |
| AD-58653.1 | 2.451 | 1.249 |

TABLE 13
C5 single dose screen in Hep3B cells with modified and
unmodified iRNAs

| | 1 nM | 0.01 nM | 1 nM | 0.01 nM |
|---|---|---|---|---|
| Duplex | AVG | AVG | STDEV | STDEV |
| AD-58143.1 | 12.13 | 100.58 | 3.47 | 3.94 |
| AD-58149.1 | 10.46 | 64.97 | 0.98 | 0.00 |
| AD-58155.1 | 44.88 | 76.24 | 1.56 | 3.74 |
| AD-58161.1 | 8.51 | 102.30 | 1.06 | 0.50 |
| AD-58167.1 | 6.54 | 76.24 | 1.15 | 3.74 |
| AD-58173.1 | 6.85 | 107.44 | 0.85 | 4.74 |
| AD-58179.1 | 10.19 | 78.07 | 0.59 | 1.15 |
| AD-58185.1 | 29.46 | 79.99 | 3.64 | 0.78 |
| AD-58144.1 | 16.82 | 81.95 | 1.09 | 0.40 |
| AD-58150.1 | 11.05 | 76.20 | 2.55 | 0.00 |
| AD-58156.1 | 25.92 | 76.73 | 2.72 | 1.50 |
| AD-58162.1 | 13.25 | 71.89 | 0.43 | 3.87 |
| AD-58168.1 | 9.74 | 45.16 | 0.52 | 1.11 |
| AD-58174.1 | 4.84 | 70.14 | 0.25 | 2.75 |
| AD-58180.1 | 9.41 | 56.77 | 1.91 | 1.95 |
| AD-58186.1 | 9.97 | 68.91 | 1.03 | 0.34 |
| AD-58145.1 | 14.29 | 103.38 | 1.94 | 2.03 |
| AD-58151.1 | 10.16 | 81.17 | 1.71 | 4.77 |
| AD-58157.1 | 4.72 | 63.19 | 1.05 | 0.00 |
| AD-58163.1 | 4.95 | 40.13 | 1.65 | 0.59 |
| AD-58169.1 | 17.02 | 83.10 | 1.88 | 2.04 |
| AD-58175.1 | 8.30 | 62.54 | 0.28 | 0.31 |
| AD-58181.1 | 21.89 | 55.26 | 4.22 | 3.52 |
| AD-58187.1 | 61.96 | 71.12 | 2.61 | 2.79 |
| AD-58146.1 | 14.25 | 95.23 | 2.64 | 6.53 |
| AD-58152.1 | 11.22 | 70.09 | 0.80 | 7.88 |
| AD-58158.1 | 7.96 | 98.86 | 0.76 | 4.36 |
| AD-58164.1 | 11.60 | 43.83 | 2.06 | 3.43 |
| AD-58170.1 | 12.28 | 39.59 | 0.96 | 1.36 |
| AD-58176.1 | 6.89 | 38.77 | 1.04 | 1.33 |
| AD-58182.1 | 18.65 | 55.78 | 0.96 | 0.55 |
| AD-58188.1 | 5.40 | 69.39 | 1.07 | 0.34 |
| AD-58147.1 | 8.22 | 106.66 | 0.77 | 2.61 |
| AD-58153.1 | 68.10 | 104.17 | 4.44 | 18.29 |
| AD-58159.1 | 8.76 | 81.41 | 1.54 | 2.79 |
| AD-58190.1 | 21.94 | 77.26 | 2.23 | 0.76 |
| AD-58196.1 | 15.97 | 72.43 | 1.07 | 5.32 |
| AD-58202.1 | 11.99 | 93.83 | 5.34 | 2.76 |
| AD-58208.1 | 18.63 | 52.07 | 12.88 | 2.55 |
| AD-58214.1 | 6.85 | 94.15 | 0.51 | 2.31 |
| AD-58220.1 | 11.50 | 78.34 | 3.85 | 0.77 |
| AD-58226.1 | 5.77 | 57.75 | 1.71 | 1.13 |
| AD-58231.1 | 7.23 | 75.67 | 1.07 | 0.74 |
| AD-58191.1 | 35.40 | 66.17 | 5.50 | 4.21 |
| AD-58197.1 | 12.05 | 67.49 | 1.70 | 0.33 |
| AD-58203.1 | 15.16 | 66.80 | 1.46 | 1.31 |
| AD-58209.1 | 7.58 | 71.23 | 3.58 | 6.28 |
| AD-58233.1 | 27.01 | 86.02 | 0.86 | 0.42 |
| AD-58193.1 | 15.37 | 99.85 | 1.44 | 0.00 |
| AD-58199.1 | 21.52 | 78.39 | 6.02 | 16.40 |
| AD-58205.1 | 24.13 | 78.88 | 5.46 | 0.77 |
| AD-58211.1 | 16.38 | 32.37 | 2.61 | 0.48 |
| AD-58217.1 | 12.23 | 70.16 | 0.29 | 3.44 |
| AD-58223.1 | 8.51 | 72.85 | 3.01 | 1.79 |
| AD-58229.1 | 5.50 | 75.93 | 1.96 | 0.37 |
| AD-58234.1 | 46.86 | 101.94 | 15.59 | 0.00 |
| AD-58194.1 | 14.49 | 107.05 | 2.47 | 4.20 |
| AD-58200.1 | 16.21 | 61.04 | 0.96 | 1.20 |
| AD-58206.1 | 13.25 | 37.73 | 2.82 | 2.03 |
| AD-58236.1 | 8.29 | 119.17 | 1.16 | 2.92 |
| AD-58242.1 | 12.05 | 102.69 | 0.44 | 4.03 |
| AD-58248.1 | 62.78 | 83.41 | 15.22 | 3.27 |
| AD-58254.1 | 11.18 | 100.54 | 1.59 | 0.00 |
| AD-58260.1 | 8.42 | 71.84 | 1.10 | 0.35 |
| AD-58266.1 | 14.05 | 92.21 | 1.91 | 2.26 |
| AD-58272.1 | 22.63 | 81.11 | 1.62 | 1.59 |
| AD-58277.1 | 70.51 | 75.67 | 4.80 | 0.74 |
| AD-58237.1 | 28.10 | 98.56 | 1.96 | 5.79 |
| AD-58243.1 | 14.16 | 86.05 | 1.11 | 2.95 |
| AD-58249.1 | 77.08 | 96.45 | 15.14 | 0.95 |
| AD-58255.1 | 12.27 | 47.89 | 2.58 | 0.00 |
| AD-58279.1 | 25.78 | 94.13 | 5.52 | 0.46 |
| AD-58239.1 | 22.98 | 83.45 | 0.28 | 4.91 |
| AD-58245.1 | 89.60 | 90.93 | 15.24 | 0.45 |
| AD-58251.1 | 28.39 | 86.32 | 7.29 | 0.00 |
| AD-58257.1 | 48.97 | 64.53 | 9.10 | 1.90 |
| AD-58263.1 | 9.14 | 83.39 | 1.27 | 1.63 |
| AD-58269.1 | 83.84 | 75.94 | 15.90 | 1.12 |
| AD-58275.1 | 10.29 | 86.32 | 0.73 | 0.85 |
| AD-58280.1 | 72.77 | 110.04 | 7.44 | 3.24 |
| AD-58240.1 | 65.42 | 75.69 | 3.82 | 2.23 |
| AD-58246.1 | 59.19 | 65.88 | 28.95 | 0.65 |
| AD-58252.1 | 15.35 | 97.26 | 1.14 | 7.62 |
| Mock | 76.53 | 66.57 | 14.26 | 4.72 |
| AD-1955 | 72.30 | 82.72 | 19.54 | 49.99 |
| Untreated | 100.00 | 100.00 | 21.68 | 26.78 |

TABLE 14
C5 single dose screen in primary mouse hepatocytes with modified and
unmodified iRNAs

| | 1 nM | 0.1 nM | 1 nM | 0.1 nM |
|---|---|---|---|---|
| Duplex ID | AVG | AVG | STDEV | STDEV |
| AD-58143.1 | 4.51 | 81.77 | 3.13 | 8.75 |
| AD-58149.1 | 4.65 | 73.16 | 3.14 | 20.17 |
| AD-58155.1 | 65.56 | 79.74 | 4.66 | 9.36 |
| AD-58161.1 | 16.82 | 81.11 | 6.22 | 7.43 |
| AD-58167.1 | 4.72 | 77.12 | 1.17 | 14.25 |
| AD-58173.1 | 5.57 | 76.00 | 3.14 | 13.52 |
| AD-58179.1 | 14.55 | 77.88 | 1.44 | 18.40 |
| AD-58185.1 | 15.69 | 72.59 | 8.67 | 7.81 |
| AD-58144.1 | 8.70 | 91.49 | 0.90 | 7.08 |
| AD-58150.1 | 12.51 | 84.01 | 1.64 | 8.20 |
| AD-58156.1 | 18.23 | 97.32 | 1.47 | 19.50 |
| AD-58162.1 | 7.72 | 78.89 | 5.19 | 13.80 |
| AD-58190.1 | 11.86 | 92.80 | 2.82 | 4.41 |
| AD-58196.1 | 7.27 | 82.71 | 1.39 | 31.81 |
| AD-58202.1 | 10.67 | 87.11 | 1.04 | 35.79 |
| AD-58208.1 | 32.21 | 74.39 | 8.60 | 27.45 |
| AD-58214.1 | 4.24 | 67.63 | 0.45 | 17.85 |
| AD-58220.1 | 13.64 | 96.14 | 4.56 | 14.36 |
| AD-58226.1 | 3.83 | 63.44 | 1.30 | 11.94 |
| AD-58231.1 | 5.95 | 82.24 | 2.80 | 17.36 |
| AD-58191.1 | 14.50 | 99.50 | 5.48 | 5.53 |
| AD-58197.1 | 16.12 | 93.09 | 0.81 | 3.21 |
| AD-58203.1 | 12.52 | 104.63 | 5.98 | 6.02 |
| AD-58209.1 | 8.79 | 59.35 | 3.05 | 13.07 |
| AD-58233.1 | 9.50 | 64.26 | 5.69 | 8.70 |
| AD-58193.1 | 8.88 | 89.60 | 3.36 | 3.08 |
| AD-58199.1 | 13.56 | 87.14 | 2.18 | 6.44 |
| AD-58205.1 | 46.84 | 89.13 | 4.48 | 17.16 |
| AD-58211.1 | 13.10 | 111.62 | 1.10 | 21.54 |
| AD-58217.1 | 29.79 | 117.49 | 11.85 | 20.41 |
| AD-58223.1 | 20.53 | 105.44 | 1.94 | 2.98 |
| AD-58229.1 | 13.76 | 98.15 | 1.05 | 9.03 |
| AD-58234.1 | 12.33 | 71.34 | 0.72 | 4.17 |
| AD-58194.1 | 14.02 | 90.60 | 1.39 | 15.64 |
| AD-58200.1 | 5.25 | 90.95 | 1.37 | 31.70 |
| AD-58206.1 | 8.19 | 109.47 | 3.99 | 21.75 |
| AD-58236.1 | 2.07 | 70.19 | 0.80 | 20.59 |
| AD-58242.1 | 4.76 | 53.26 | 1.59 | 11.56 |
| AD-58248.1 | 62.42 | 78.23 | 5.47 | 25.85 |
| AD-58254.1 | 16.47 | 70.22 | 2.92 | 21.74 |
| AD-58260.1 | 2.84 | 75.65 | 0.38 | 11.59 |
| AD-58266.1 | 40.70 | 89.88 | 16.05 | 11.57 |
| AD-58272.1 | 21.42 | 59.44 | 13.29 | 10.98 |
| AD-58277.1 | 71.72 | 121.44 | 16.35 | 21.16 |
| AD-58237.1 | 11.85 | 112.68 | 9.22 | 12.88 |
| AD-58243.1 | 10.46 | 90.64 | 3.42 | 4.33 |
| AD-58249.1 | 71.47 | 113.30 | 4.30 | 3.84 |
| AD-58255.1 | 6.86 | 78.55 | 2.22 | 28.37 |
| AD-58279.1 | 7.15 | 74.96 | 2.84 | 4.72 |
| AD-58239.1 | 13.64 | 106.45 | 1.87 | 8.25 |
| AD-58245.1 | 68.67 | 112.08 | 21.89 | 7.73 |
| AD-58251.1 | 47.01 | 133.20 | 4.69 | 7.14 |
| AD-58257.1 | 30.68 | 87.51 | 2.87 | 32.84 |
| AD-58263.1 | 7.22 | 83.23 | 2.55 | 37.50 |
| AD-58269.1 | 78.90 | 106.06 | 5.07 | 3.04 |
| AD-58275.1 | 8.92 | 95.77 | 1.91 | 7.14 |
| AD-58280.1 | 16.67 | 78.47 | 4.15 | 6.06 |
| AD-58240.1 | 71.03 | 138.54 | 5.32 | 10.87 |
| AD-58246.1 | 71.87 | 89.02 | 4.95 | 8.63 |
| AD-58252.1 | 4.04 | 56.10 | 1.23 | 12.02 |
| Mock | 66.84 | 82.81 | 2.75 | 17.19 |
| AD-1955 | 87.44 | 102.07 | 3.64 | 4.08 |
| Untreated | 100.00 | 100.00 | 15.25 | 18.37 |

TABLE 15
IC₅₀ data in Hep3B cells with modified and unmodified iRNAs

| Duplex ID | IC₅₀ (pM) | STDEV |
|---|---|---|
| AD-58143.1 | 36.35 | 12.26 |
| AD-58149.1 | 5.735 | 6.196 |
| AD-58161.1 | 78.12 | 26.64 |
| AD-58167.1 | 31.03 | 18.14 |
| AD-58173.1 | 29.12 | 16.53 |
| AD-58236.1 | 52.73 | 32.02 |
| AD-58242.1 | 8.859 | 4.321 |
| AD-58260.1 | 7.706 | 5.094 |
| AD-58263.1 | 96.64 | 47.61 |

TABLE 16
IC₅₀ data in primary mouse hepatocytes with modified and
unmodified iRNAs

| Duplex ID | IC₅₀ (pM) | STDEV |
|---|---|---|
| AD-58260.1 | 1.015 | 0.9676 |
| AD-58149.1 | 1.309 | 1.749 |
| AD-58167.1 | 1.991 | 2.477 |
| AD-58242.1 | 0.5866 | 1.8 |
| AD-58236.1 | 0.4517 | 0.06392 |
| AD-58143.1 | 0.8876 | 0.1613 |
| AD-58279.1 | 3.116 | 0.7368 |
| AD-58252.1 | 7.153 | 1.021 |
| AD-58173.1 | 7.144 | 19.88 |
| AD-58263.1 | 3.224 | 5.478 |

### Example 3. In Vivo Screening

[0870] A subset of seven GalNAC conjugated iRNAs was selected for further in vivo evaluation.

[0871] C57BL/6 mice (N=3 per group) were injected subcutaneously with 10 mg/kg of GalNAc conjugated duplexes or an equal volume of 1× Dulbecco's Phosphate-Buffered Saline (DPBS) (Life Technologies, Cat#14040133). Forty-eight hours later, mice were euthanized and the livers were dissected and flash frozen in liquid nitrogen. Livers were ground in a 2000 Geno/Grinder (SPEX SamplePrep, Metuchen, N.J.). Approximately 10 mg of liver powder per sample was used for RNA isolation. Samples were first homogenized in a TissueLyserII (Qiagen Inc, Valencia, Calif.) and then RNA was extracted using a RNeasy 96 Universal Tissue Kit (Qiagen Inc, Cat#74881) following manufacturer's protocol using vacuum/spin technology. RNA concentration was measured by a NanoDrop 8000 (Thermo Scientific, Wilmington, Del.) and was adjusted to 100 ng/μl. cDNA and RT-PCR were performed as described above.

[0872] The results of the single dose screen are depicted in FIG. 2. Table 17 shows the results of an in vivo single dose screen with the indicated GalNAC conjugated modified iRNAs. Data are expressed as percent of mRNA remaining relative to DPBS treated mice. The “Experiments” column lists the number of experiments from which the average was calculated. The standard deviation is calculated from all mice in a group across all experiments analyzed.

TABLE 17
In vivo C5 single dose screen

| Duplex ID | Experiments | AVG | STDEV |
|---|---|---|---|
| AD-58088.2 | 2 | 82.66 | 13.54 |
| AD-58644.1 | 1 | 37.79 | 9.63 |
| AD-58651.1 | 1 | 75.33 | 5.21 |
| AD-58099.2 | 2 | 71.94 | 15.45 |
| AD-58641.1 | 1 | 20.09 | 4.09 |
| AD-58648.1 | 1 | 48.43 | 9.07 |
| AD-58111.2 | 3 | 67.17 | 13.60 |
| AD-58642.1 | 2 | 21.78 | 5.32 |
| AD-58649.1 | 1 | 45.30 | 14.02 |
| AD-58116.2 | 2 | 70.16 | 10.32 |
| AD-58647.1 | 1 | 26.77 | 4.14 |
| AD-58654.1 | 1 | 50.06 | 27.85 |
| AD-58121.2 | 2 | 52.56 | 13.00 |
| AD-58645.1 | 1 | 24.60 | 1.29 |
| AD-58652.1 | 1 | 52.67 | 3.87 |
| AD-58123.2 | 2 | 65.70 | 9.60 |
| AD-58643.1 | 1 | 23.21 | 2.41 |
| AD-58650.1 | 1 | 46.75 | 14.10 |
| AD-58133.2 | 3 | 51.98 | 13.45 |
| AD-58646.1 | 2 | 28.67 | 5.34 |
| AD-58653.1 | 1 | 43.02 | 10.61 |
| PBS | 3 | 100.00 | 9.03 |

[0873] Two of the most efficacious GalNAC conjugated iRNAs were further modified to include additional phosphorothioate linkages (Table 18) and the efficacy of these duplexes was determined in vivo as described above. The results of the single dose screen are depicted in FIG. 3 and demonstrate that the iRNA agents with additional phosphorothiate linkages are more efficacious than those iRNA agents without or with fewer phosphorothioate linkages.

TABLE 18
Phosphorothioate Modifed GalNAC Conjugated C5 iRNAs

| | | | SEQ | |
|---|---|---|---|---|
| | | | ID | |
| Duplex ID | Sense strand | Sense sequence | NO: | Antisense |
| AD-58642.1 | A-119324.1 | GfsasCfaAfaAfuAfAfCfuCfaCfuAfuAfaUfL96 | 551 | A-119325.1 |
| AD-58111.2 | A-118316.1 | GfaCfaAfaAfuAfAfCfuCfaCfuAfuAfaUfL96 | 552 | A-118317.1 |
| AD-58646.1 | A-119332.1 | CfsasGfaUfcAfaAfCfAfcAfaUfuUfcAfgUfL96 | 553 | A-119333.1 |
| AD-58133.2 | A-118386.1 | CfaGfaUfcAfaAfCfAfcAfaUfuUfcAfgUfL96 | 554 | A-118387.1 |

| | | SEQ | |
|---|---|---|---|
| | | ID | |
| Duplex ID | Antisense sequence | NO: | Cross Reactivity |
| AD-58642.1 | asUfsuAfuAfgUfgAfguuAfuUfuUfgUfcsasa | 555 | HumRheMusRat |
| AD-58111.2 | aUfuAfuAfgUfgAfguuAfuUfuUfgUfcsAfsa | 556 | HumRheMusRat |
| AD-58646.1 | asCfsuGfaAfaUfuGfuguUfuGfaUfcUfgscsa | 557 | MusRat |
| AD-58133.2 | aCfuGfaAfaUfuGfuguUfuGfaUfcUfgsCfsa | 558 | MusRat |

[0874] Given the impact of the additional phosphorothioate linkages on the silencing ability of the iRNA agents described above, the efficacy of additional GalNAC conjugated iRNA duplexes including phosphorothioate linkages (Table 19) was determined in vivo as described above. The results of this single dose screen are depicted in FIG. 4.

[0875] The duration of silencing of AD-58642 in vivo was determined by administering a single 2.5 mg/kg, 10 mg/kg, or 25 mg/kg dose to rats and determining the amount of C5 protein (FIG. 5B) present on day 7 and the activity of C5 protein (FIG. 5A) present on days 4 and 7. As demonstrated in FIG. 5, there is a 50% reduction in the activity of C5 protein by Day 4 at a 25 mg/kg dose and at Day 7, a greater than 70% reduction in the activity of C5 protein.

[0876] The amount of C5 protein was determined by Western blot analysis of whole serum. The activity of C5 protein was determined by a hemolysis assay. Briefly, a fixed dilution of human C5 depleted human serum was mixed with mouse serum and incubated with antibody-coated sheep red blood cells for 1 hour. The hemoglobin absorbance was measured and the % hemolysis as compared to a reference curve (prepared using a dilution series of mouse serum) was calculated.

[0877] The efficacy of AD-58642 in vivo was also assayed in mice following a single subcutaneous injection of 1.25 mg/kg, 2.5 mg/kg, 5 mg/kg, 10 mg/kg, and 25 mg/kg of AD-58642. At day 5 C5 mRNA was assayed in liver samples using qPCR, C5 activity was assayed for hemolysis, and the amount of C5 protein was determined by Western blot analysis of whole serum.

[0878] As depicted in FIGS. 6A and 6B, although there is only a minor improvement (i.e., about 5%) in efficacy of AD-58642 to inhibit C5 mRNA at a dose of 25 mg/kg as compared to a 10 mg/kg dose, there is an average of 85% silencing with a 25 mg/kg dose. In addition, there is a dose response effect with an IC₅₀ of about 2.5 mg/kg.

[0879] FIGS. 7A and 7B and 8 demonstrate that AD-58642 is efficacious for decreasing the amount of C5 protein (FIG. 8) and C5 protein activity (FIGS. 7A and 7B).

[0880] The duration of silencing of AD-58641 in vivo was also determined by subcutaneously administering a single 0.625 mg/kg, 1.25 mg/kg, 2.5 mg/kg, 5.0 mg/kg, or 10 mg/kg dose of AD-58641 to C57Bl/6 (n=3) mice and determining the amount of C5 protein present in these animals on days 5 and 9 by ELISA. Briefly, serum was collected on day 0, pre-bleed, day 5, and day 9 and the levels of C5 proteins were quantified by ELISA. C5 protein levels were normalized to the day 0 pre-bleed level. As depicted in FIG. 9, the results demonstrate that there is a dose dependent potent and durable knock-down of C5 serum protein. (The single dose ED₅₀ was 0.6 mg/kg).

[0881] Compound AD-58641 was also tested for efficacy in C57Bl/6 mice using a multi-dosing administration protocol. Mice were subcutaneously administered compound AD-58641 at a 0.625 mg/kg, 1.25 mg/kg, or 2.5 mg/kg dose at days 0, 1, 2, and 3. Serum was collected at days 0 and 8 as illustrated in FIG. 10 and analyzed for C5 protein levels by ELISA. C5 levels were normalized to the day 0 pre-bleed level. FIG. 10 shows that multi-dosing of AD-58641 achieves silencing of C5 protein at all of the does tested, with a greater than 90% silencing of C5 protein at a dose of 2.5 mg/kg.

[0882] Compound AD-58641 was further tested for efficacy and to evaluate the cumulative effect of the compound in rats using a repeat administration protocol. Wild-type Sprague Dawley rats were subcutaneously injected with compound AD-58641 at a 2.5 mg/kg/dose or 5.0 mg/kg/dose twice a week for 3 weeks (q2w×3). Serum was collected on days 0, 4, 7, 11, 14, 18, 25, and 32. Serum hemolytic activity was quantified using a hemolysis assay in which a 1:150 dilution of rat serum was incubated with sensitized sheep rat blood cells in GVB++ buffer for 1 hour and hemoglobin release was quantified by measuring absorbance at 415 nm (see FIG. 11A). The amount of C5 protein present in the samples was also determined by ELISA (FIG. 11B). The results demonstrate a dose dependent potent and durable decrease in hemolytic activity, achieving about 90% hemolytic activity inhibition.

TABLE 19
Additional Phosphorothioate Modifed GalNAC Conjugated C5 iRNAs

| Duplex ID | Sense strand | Sense sequence | SEQ ID NO: | Antisense |
|---|---|---|---|---|
| AD-58088.2 | A-118324.1 | AfuUfuAfaAfcAfAfCfaAfgUfaCfcUfuUfL96 | 559 | A-118325.1 |
| AD-58644.1 | A-119328.1 | AfsusUfuAfaAfcAfAfCfaAfgUfaCfcUfuUfL96 | 560 | A-119329.1 |
| AD-58651.1 | A-119328.2 | AfsusUfuAfaAfcAfAfCfaAfgUfaCfcUfuUfL96 | 561 | A-119339.1 |
| AD-58099.2 | A-118312.1 | UfgAfcAfaAfaUfAfAfcUfcAfcUfaUfaAfL96 | 562 | A-118313.1 |
| AD-58641.1 | A-119322.1 | UfsgsAfcAfaAfaUfAfAfcUfcAfcUfaUfaAfL96 | 563 | A-119323.1 |
| AD-58648.1 | A-119322.2 | UfsgsAfcAfaAfaUfAfAfcUfcAfcUfaUfaAfL96 | 564 | A-119336.1 |
| AD-58111.2 | A-118316.1 | GfaCfaAfaAfuAfAfCfuCfaCfuAfuAfaUfL96 | 565 | A-118317.1 |
| AD-58642.1 | A-119324.1 | GfsasCfaAfaAfuAfAfCfuCfaCfuAfuAfaUfL96 | 566 | A-119325.1 |
| AD-58649.1 | A-119324.2 | GfsasCfaAfaAfuAfAfCfuCfaCfuAfuAfaUfL96 | 567 | A-119337.1 |
| AD-58116.2 | A-118396.1 | GfuUfcCfgGfaUfAfUfuUfgAfaCfuUfuUfL96 | 568 | A-118397.1 |
| AD-58647.1 | A-119334.1 | GfsusUfcCfgGfaUfAfUfuUfgAfaCfuUfuUfL96 | 569 | A-119335.1 |
| AD-58654.1 | A-119334.2 | GfsusUfcCfgGfaUfAfUfuUfgAfaCfuUfuUfL96 | 570 | A-119342.1 |
| AD-58121.2 | A-118382.1 | UfgCfaGfaUfcAfAfAfcAfcAfaUfuUfcAfL96 | 571 | A-118383.1 |
| AD-58645.1 | A-119330.1 | UfsgsCfaGfaUfcAfAfAfcAfcAfaUfuUfcAfL96 | 572 | A-119331.1 |
| AD-58652.1 | A-119330.2 | UfsgsCfaGfaUfcAfAfAfcAfcAfaUfuUfcAfL96 | 573 | A-119340.1 |
| AD-58123.2 | A-118320.1 | AfaGfcAfaGfaUfAfUfuUfuUfaUfaAfuAfL96 | 574 | A-118321.1 |
| AD-58643.1 | A-119326.1 | AfsasGfcAfaGfaUfAfUfuUfuUfaUfaAfuAfL96 | 575 | A-119327.1 |
| AD-58650.1 | A-119326.2 | AfsasGfcAfaGfaUfAfUfuUfuUfaUfaAfuAfL96 | 576 | A-119338.1 |
| AD-58133.2 | A-118386.1 | CfaGfaUfcAfaAfCfAfcAfaUfuUfcAfgUfL96 | 577 | A-118387.1 |
| AD-58646.1 | A-119332.1 | CfsasGfaUfcAfaAfCfAfcAfaUfuUfcAfgUfL96 | 578 | A-119333.1 |
| AD-58653.1 | A-119332.2 | CfsasGfaUfcAfaAfCfAfcAfaUfuUfcAfgUfL96 | 579 | A-119341.1 |

| | | SEQ | | | |
|---|---|---|---|---|---|
| | | ID | Start | | |
| Duplex ID | Antisense sequence | NO: | position | Cross Reactivity | PS# |
| AD-58088.2 | aAfaGfgUfaCfuUfguuGfuUfuAfaAfusCfsu | 580 | 984 | HumRheMus | 2 |
| AD-58644.1 | asAfsaGfgUfaCfuUfguuGfuUfuAfaAfuscsu | 581 | 984 | HumRheMus | 6 |
| AD-58651.1 | asAfsaGfsgUfsaCfsuUfsguuGfsuUfsuAfsaAfsuscsu | 582 | 984 | HumRheMus | 14 |
| AD-58099.2 | uUfaUfaGfuGfaGfuuaUfuUfuGfuCfasAfsu | 583 | 1513 | HumRheMusRat | 2 |
| AD-58641.1 | usUfsaUfaGfuGfaGfuuaUfuUfuGfuCfasasu | 584 | 1513 | HumRheMusRat | 6 |
| AD-58648.1 | usUfsaUfsaGfsuGfsaGfsuuaUfsuUfsuGfsuCfsasasu | 585 | 1513 | HumRheMusRat | 14 |
| AD-58111.2 | aUfuAfuAfgUfgAfguuAfuUfuUfgUfcsAfsa | 586 | 1514 | HumRheMusRat | 2 |
| AD-58642.1 | asUfsuAfuAfgUfgAfguuAfuUfuUfgUfcsasa | 587 | 1514 | HumRheMusRat | 6 |
| AD-58649.1 | asUfsuAfsuAfsgUfsgAfsguuAfsuUfsuUfsgUfscsasa | 588 | 1514 | HumRheMusRat | 14 |
| AD-58116.2 | aAfaAfgUfuCfaAfauaUfcCfgGfaAfcsCfsg | 589 | 4502 | MusRat | 2 |
| AD-58647.1 | asAfsaAfgUfuCfaAfauaUfcCfgGfaAfcscsg | 590 | 4502 | MusRat | 6 |
| AD-58654.1 | asAfsaAfsgUfsuCfsaAfsauaUfscCfsgGfsaAfscscsg | 591 | 4502 | MusRat | 14 |
| AD-58121.2 | uGfaAfaUfuGfuGfuuuGfaUfcUfgCfasGfsa | 592 | 4945 | MusRat | 2 |
| AD-58645.1 | usGfsaAfaUfuGfuGfuuuGfaUfcUfgCfasgsa | 593 | 4945 | MusRat | 6 |
| AD-58652.1 | usGfsaAfsaUfsuGfsuGfsuuuGfsaUfscUfsgCfsasgsa | 594 | 4945 | MusRat | 14 |
| AD-58123.2 | uAfuUfaUfaAfaAfauaUfcUfuGfcUfusUfsu | 595 | 786 | HumRheMus | 2 |
| AD-58643.1 | usAfsuUfaUfaAfaAfauaUfcUfuGfcUfususu | 596 | 786 | HumRheMus | 6 |
| AD-58650.1 | usAfsuUfsaUfsaAfsaAfsauaUfscUfsuGfscUfsususu | 597 | 786 | HumRheMus | 14 |
| AD-58133.2 | aCfuGfaAfaUfuGfuguUfuGfaUfcUfgsCfsa | 598 | 4947 | MusRat | 2 |
| AD-58646.1 | asCfsuGfaAfaUfuGfuguUfuGfaUfcUfgscsa | 599 | 4947 | MusRat | 6 |
| AD-58653.1 | asCfsuGfsaAfsaUfsuGfsuguUfsuGfsaUfscUfsgscsa | 600 | 4947 | MusRat | 14 |

### Example 4: Design, Synthesis, and In Vitro Screening of Additional siRNAs siRNA Design

[0883] C5 duplexes, 19 nucleotides long for both the sense and antisense strand, were designed using the human C5 mRNA sequence set forth in GenBank Accession No. NM_001735.2. Five-hundred and sixty-nine duplexes were initially identified that did not contain repeats longer than 7 nucleotides, spanning substantially the entire 5480 nucleotide transcript. All 569 duplexes are then scored for predicted efficacy according to a linear model that evaluates the nucleotide pair at each duplex position, and the dose and cell line to be used for screening. The duplexes are also matched against all transcripts in the human RefSeq collection using a custom brute force algorithm, and scored for lowest numbers of mismatches (per strand) to transcripts other than C5. Duplexes to be synthesized and screened are then selected from the 569, according to the following scheme: Beginning at the 5′ end of the transcript, a duplex is selected within a “window” of every 10±2 nucleotides that

[0884] 1) had the highest predicted efficacy,

[0885] 2) had at least one mismatch in both strands to all transcripts other than SERPINC1,

[0886] 3) had not already been synthesized and screened as part of other duplex sets.

[0887] If no duplex is identified within a given window that satisfied all criteria, that window was skipped.

[0888] A detailed list of the 569 C5 sense and antisense strand sequences is shown in Table 20.

[0889] The in vitro efficacy of duplexes comprising the sense and antisense sequences listed in Table 20 is determined using the following methods.

### Cell Culture and Transfections

[0890] HepG2 cells (ATCC, Manassas, Va.) are grown to near confluence at 37° C. in an atmosphere of 5% CO2 in Eagle's Minimum Essential Medium (ATCC) supplemented with 10% FBS, streptomycin, and glutamine (ATCC) before being released from the plate by trypsinization. Transfection is carried out by adding 14.8 μl of Opti-MEM plus 0.2 μl of Lipofectamine RNAiMax per well (Invitrogen, Carlsbad Calif. cat #13778-150) to 5 μl of each of the 164 siRNA duplexes to an individual well in a 96-well plate. The mixture is then incubated at room temperature for 15 minutes. 80 μl of complete growth media without antibiotic containing ˜2.5×10⁴ HepG2 cells is then added to the siRNA mixture. Cells are incubated for 24 hours prior to RNA purification. Experiments are performed at 20 nM and included naïve cells and cells transfected with AD-1955, a luciferase targeting siRNA as negative controls.

Total RNA Isolation Using DYNABEADS mRNA Isolation Kit (Invitrogen, Part #: 610-12)

[0891] Cells are harvested and lysed in 150 μl of Lysis/Binding Buffer then mixed for 5 minute at 700 rpm on a platform shaker (the mixing speed was the same throughout the process). Ten microliters of magnetic beads and 80 μl Lysis/Binding Buffer mixture are added to a round bottom plate and mixed for 1 minute. Magnetic beads are captured using magnetic stand and the supernatant is removed without disturbing the beads. After removing supernatant, the lysed cells are added to the remaining beads and mixed for 5 minutes. After removing supernatant, magnetic beads are washed 2 times with 150 μl Wash Buffer A and mixed for 1 minute. Beads are captured again and supernatant removed. Beads are then washed with 150 μl Wash Buffer B, captured and supernatant is removed. Beads are next washed with 150 μl Elution Buffer, captured and supernatant removed. Beads are allowed to dry for 2 minutes. After drying, 50 μl of Elution Buffer is added and mixed for 5 minutes at 70° C. Beads are captured on magnet for 5 minutes. Forty μl of supernatant, containing the isolated RNA is removed and added to another 96 well plate.

cDNA Synthesis Using ABI High Capacity cDNA Reverse Transcription Kit (Applied Biosystems, Foster City, Calif., Cat #4368813)

[0892] A master mix of 2 μl 10× Buffer, 0.8 μl 25×dNTPs, 2 μl Random primers, 1 μl Reverse Transcriptase, 1 μl RNase inhibitor and 3.2 μl of H₂O per reaction is added into 10 μl total RNA. cDNA is generated using a Bio-Rad C-1000 or S-1000 thermal cycler (Hercules, Calif.) through the following steps: 25° C. 10 min, 37° C. 120 min, 85° C. 5 sec, 4° C. hold.

### Real Time PCR

[0893] Two μl of cDNA is added to a master mix containing 0.5 μl human GAPDH TaqMan Probe (Applied Biosystems Cat #4326317E), 0.5 μl human SERPINC1 TaqMan probe (Applied Biosystems cat # Hs00892758_m1) and 5 μl Lightcycler 480 probe master mix (Roche Cat #04887301001) per well in a 384-well plate (Roche cat #04887301001). Real time PCR is performed in an LC480 Real Time PCR machine (Roche).

[0894] To calculate relative fold change, real time data is analyzed using the ΔΔCt method and normalized to assays performed with cells transfected with 20 nM AD-1955.

TABLE 20
Additional C5 unmodified sense and antisense strand sequences

| | Position in | | SEQ ID | | SEQ ID |
|---|---|---|---|---|---|
| Oligo Name | NM_001735.2 | Sense Sequence | NO: | Antisense Sequence | NO: |
| NM_001735.2_3-21_s | 3-21 | UAUCCGUGGUUUCCUGCUA | 601 | UAGCAGGAAACCACGGAUA | 1170 |
| NM_001735.2_10-28_s | 10-28 | GGUUUCCUGCUACCUCCAA | 602 | UUGGAGGUAGCAGGAAACC | 1171 |
| NM_001735.2_22-40_s | 22-40 | CCUCCAACCAUGGGCCUUU | 603 | AAAGGCCCAUGGUUGGAGG | 1172 |
| NM_001735.2_33-51_s | 33-51 | GGGCCUUUUGGGAAUACUU | 604 | AAGUAUUCCCAAAAGGCCC | 1173 |
| NM_001735.2_43-61_s | 43-61 | GGAAUACUUUGUUUUUUAA | 605 | UUAAAAAACAAAGUAUUCC | 1174 |
| NM_001735.2_49-67_s | 49-67 | CUUUGUUUUUUAAUCUUCC | 606 | GGAAGAUUAAAAAACAAAG | 1175 |
| NM_001735.2_63-81_s | 63-81 | CUUCCUGGGGAAAACCUGG | 607 | CCAGGUUUUCCCCAGGAAG | 1176 |
| NM_001735.2_71-89_s | 71-89 | GGAAAACCUGGGGACAGGA | 608 | UCCUGUCCCCAGGUUUUCC | 1177 |
| NM_001735.2_81-99_s | 81-99 | GGGACAGGAGCAAACAUAU | 609 | AUAUGUUUGCUCCUGUCCC | 1178 |
| NM_001735.2_91-109_s | 91-109 | CAAACAUAUGUCAUUUCAG | 610 | CUGAAAUGACAUAUGUUUG | 1179 |
| NM_001735.2_102-120_s | 102-120 | CAUUUCAGCACCAAAAAUA | 611 | UAUUUUUGGUGCUGAAAUG | 1180 |
| NM_001735.2_109-127_s | 109-127 | GCACCAAAAAUAUUCCGUG | 612 | CACGGAAUAUUUUUGGUGC | 1181 |
| NM_001735.2_123-141_s | 123-141 | CCGUGUUGGAGCAUCUGAA | 613 | UUCAGAUGCUCCAACACGG | 1182 |
| NM_001735.2_130-148_s | 130-148 | GGAGCAUCUGAAAAUAUUG | 614 | CAAUAUUUUCAGAUGCUCC | 1183 |
| NM_001735.2_139-157_s | 139157 | GAAAAUAUUGUGAUUCAAG | 615 | CUUGAAUCACAAUAUUUUC | 1184 |
| NM_001735.2_150-168_s | 150-168 | GAUUCAAGUUUAUGGAUAC | 616 | GUAUCCAUAAACUUGAAUC | 1185 |
| NM_001735.2_163-181_s | 163-181 | GGAUACACUGAAGCAUUUG | 617 | CAAAUGCUUCAGUGUAUCC | 1186 |
| NM_001735.2_172-190_s | 172-190 | GAAGCAUUUGAUGCAACAA | 618 | UUGUUGCAUCAAAUGCUUC | 1187 |
| NM_001735.2_183-201_s | 183-201 | UGCAACAAUCUCUAUUAAA | 619 | UUUAAUAGAGAUUGUUGCA | 1188 |
| NM_001735.2_189-207_s | 189-207 | AAUCUCUAUUAAAAGUUAU | 620 | AUAACUUUUAAUAGAGAUU | 1189 |
| NM_001735.2_201-219_s | 201-219 | AAGUUAUCCUGAUAAAAAA | 621 | UUUUUUAUCAGGAUAACUU | 1190 |
| NM_001735.2_209-227_s | 209-227 | CUGAUAAAAAAUUUAGUUA | 622 | UAACUAAAUUUUUUAUCAG | 1191 |
| NM_001735.2_221-239_s | 221-239 | UUAGUUACUCCUCAGGCCA | 623 | UGGCCUGAGGAGUAACUAA | 1192 |
| NM_001735.2_230-248_s | 230-248 | CCUCAGGCCAUGUUCAUUU | 624 | AAAUGAACAUGGCCUGAGG | 1193 |
| NM_001735.2_242-260_s | 242-260 | UUCAUUUAUCCUCAGAGAA | 625 | UUCUCUGAGGAUAAAUGAA | 1194 |
| NM_001735.2_252-270_s | 252-270 | CUCAGAGAAUAAAUUCCAA | 626 | UUGGAAUUUAUUCUCUGAG | 1195 |
| NM_001735.2_259-277_s | 259-277 | AAUAAAUUCCAAAACUCUG | 627 | CAGAGUUUUGGAAUUUAUU | 1196 |
| NM_001735.2_273-291_s | 273-291 | CUCUGCAAUCUUAACAAUA | 628 | UAUUGUUAAGAUUGCAGAG | 1197 |
| NM_001735.2_282-300_s | 282-300 | CUUAACAAUACAACCAAAA | 629 | UUUUGGUUGUAUUGUUAAG | 1198 |
| NM_001735.2_292-310_s | 292-310 | CAACCAAAACAAUUGCCUG | 630 | CAGGCAAUUGUUUUGGUUG | 1199 |
| NM_001735.2_301-319_s | 301-319 | CAAUUGCCUGGAGGACAAA | 631 | UUUGUCCUCCAGGCAAUUG | 1200 |
| NM_001735.2_313-331_s | 313-331 | GGACAAAACCCAGUUUCUU | 632 | AAGAAACUGGGUUUUGUCC | 1201 |
| NM_001735.2_322-340_s | 322-340 | CCAGUUUCUUAUGUGUAUU | 633 | AAUACACAUAAGAAACUGG | 1202 |
| NM_001735.2_332-350_s | 332-350 | AUGUGUAUUUGGAAGUUGU | 634 | ACAACUUCCAAAUACACAU | 1203 |
| NM_001735.2_342-360_s | 342-360 | GGAAGUUGUAUCAAAGCAU | 635 | AUGCUUUGAUACAACUUCC | 1204 |
| NM_001735.2_349-367_s | 349-367 | GUAUCAAAGCAUUUUUCAA | 636 | UUGAAAAAUGCUUUGAUAC | 1205 |
| NM_001735.2_361-379_s | 361-379 | UUUUCAAAAUCAAAAAGAA | 637 | UUCUUUUUGAUUUUGAAAA | 1206 |
| NM_001735.2_371-389_s | 371-389 | CAAAAAGAAUGCCAAUAAC | 638 | GUUAUUGGCAUUCUUUUUG | 1207 |
| NM_001735.2_381-399_s | 381-399 | GCCAAUAACCUAUGACAAU | 639 | AUUGUCAUAGGUUAUUGGC | 1208 |
| NM_001735.2_389-407_s | 389-407 | CCUAUGACAAUGGAUUUCU | 640 | AGAAAUCCAUUGUCAUAGG | 1209 |
| NM_001735.2_399-417_s | 399-417 | UGGAUUUCUCUUCAUUCAU | 641 | AUGAAUGAAGAGAAAUCCA | 1210 |
| NM_001735.2_411-429_s | 411-429 | CAUUCAUACAGACAAACCU | 642 | AGGUUUGUCUGUAUGAAUG | 1211 |
| NM_001735.2_419-437_s | 419-437 | CAGACAAACCUGUUUAUAC | 643 | GUAUAAACAGGUUUGUCUG | 1212 |
| NM_001735.2_430-448_s | 430-448 | GUUUAUACUCCAGACCAGU | 644 | ACUGGUCUGGAGUAUAAAC | 1213 |
| NM_001735.2_441-459_s | 441-459 | AGACCAGUCAGUAAAAGUU | 645 | AACUUUUACUGACUGGUCU | 1214 |
| NM_001735.2_450-468_s | 450-468 | AGUAAAAGUUAGAGUUUAU | 646 | AUAAACUCUAACUUUUACU | 1215 |
| NM_001735.2_460-478_s | 460-478 | AGAGUUUAUUCGUUGAAUG | 647 | CAUUCAACGAAUAAACUCU | 1216 |
| NM_001735.2_470-488_s | 470-488 | CGUUGAAUGACGACUUGAA | 648 | UUCAAGUCGUCAUUCAACG | 1217 |
| NM_001735.2_483-501_s | 483-501 | CUUGAAGCCAGCCAAAAGA | 649 | UCUUUUGGCUGGCUUCAAG | 1218 |
| NM_001735.2_490-508_s | 490-508 | CCAGCCAAAAGAGAAACUG | 650 | CAGUUUCUCUUUUGGCUGG | 1219 |
| NM_001735.2_503-521_s | 503-521 | AAACUGUCUUAACUUUCAU | 651 | AUGAAAGUUAAGACAGUUU | 1220 |
| NM_001735.2_513-531_s | 513-531 | AACUUUCAUAGAUCCUGAA | 652 | UUCAGGAUCUAUGAAAGUU | 1221 |
| NM_001735.2_519-537_s | 519-537 | CAUAGAUCCUGAAGGAUCA | 653 | UGAUCCUUCAGGAUCUAUG | 1222 |
| NM_001735.2_529-547_s | 529-547 | GAAGGAUCAGAAGUUGACA | 654 | UGUCAACUUCUGAUCCUUC | 1223 |
| NM_001735.2_543-561_s | 543-561 | UGACAUGGUAGAAGAAAUU | 655 | AAUUUCUUCUACCAUGUCA | 1224 |
| NM_001735.2_553-571_s | 553-571 | GAAGAAAUUGAUCAUAUUG | 656 | CAAUAUGAUCAAUUUCUUC | 1225 |
| NM_001735.2_562-580_s | 562-580 | GAUCAUAUUGGAAUUAUCU | 657 | AGAUAAUUCCAAUAUGAUC | 1226 |
| NM_001735.2_571-589_s | 571-589 | GGAAUUAUCUCUUUUCCUG | 658 | CAGGAAAAGAGAUAAUUCC | 1227 |
| NM_001735.2_579-597_s | 579-597 | CUCUUUUCCUGACUUCAAG | 659 | CUUGAAGUCAGGAAAAGAG | 1228 |
| NM_001735.2_590-608_s | 590-608 | ACUUCAAGAUUCCGUCUAA | 660 | UUAGACGGAAUCUUGAAGU | 1229 |
| NM_001735.2_601-619_s | 601-619 | CCGUCUAAUCCUAGAUAUG | 661 | CAUAUCUAGGAUUAGACGG | 1230 |
| NM_001735.2_610-628_s | 610-628 | CCUAGAUAUGGUAUGUGGA | 662 | UCCACAUACCAUAUCUAGG | 1231 |
| NM_001735.2_623-641_s | 623-641 | UGUGGACGAUCAAGGCUAA | 663 | UUAGCCUUGAUCGUCCACA | 1232 |
| NM_001735.2_629-647_s | 629-647 | CGAUCAAGGCUAAAUAUAA | 664 | UUAUAUUUAGCCUUGAUCG | 1233 |
| NM_001735.2_642-660_s | 642-660 | AUAUAAAGAGGACUUUUCA | 665 | UGAAAAGUCCUCUUUAUAU | 1234 |
| NM_001735.2_649-667_s | 649-667 | GAGGACUUUUCAACAACUG | 666 | CAGUUGUUGAAAAGUCCUC | 1235 |
| NM_001735.2_662-680_s | 662-680 | CAACUGGAACCGCAUAUUU | 667 | AAAUAUGCGGUUCCAGUUG | 1236 |
| NM_001735.2_672-690_s | 672-690 | CGCAUAUUUUGAAGUUAAA | 668 | UUUAACUUCAAAAUAUGCG | 1237 |
| NM_001735.2_683-701_s | 683-701 | AAGUUAAAGAAUAUGUCUU | 669 | AAGACAUAUUCUUUAACUU | 1238 |
| NM_001735.2_691-709_s | 691-709 | GAAUAUGUCUUGCCACAUU | 670 | AAUGUGGCAAGACAUAUUC | 1239 |
| NM_001735.2_703-721_s | 703-721 | CCACAUUUUUCUGUCUCAA | 671 | UUGAGACAGAAAAAUGUGG | 1240 |
| NM_001735.2_713-731_s | 713-731 | CUGUCUCAAUCGAGCCAGA | 672 | UCUGGCUCGAUUGAGACAG | 1241 |
| NM_001735.2_719-737_s | 719-737 | CAAUCGAGCCAGAAUAUAA | 673 | UUAUAUUCUGGCUCGAUUG | 1242 |
| NM_001735.2_730-748_s | 730-748 | GAAUAUAAUUUCAUUGGUU | 674 | AACCAAUGAAAUUAUAUUC | 1243 |
| NM_001735.2_742-760_s | 742-760 | AUUGGUUACAAGAACUUUA | 675 | UAAAGUUCUUGUAACCAAU | 1244 |
| NM_001735.2_752-770_s | 752-770 | AGAACUUUAAGAAUUUUGA | 676 | UCAAAAUUCUUAAAGUUCU | 1245 |
| NM_001735.2_762-780_s | 762-780 | GAAUUUUGAAAUUACUAUA | 677 | UAUAGUAAUUUCAAAAUUC | 1246 |
| NM_001735.2_769-787_s | 769-787 | GAAAUUACUAUAAAAGCAA | 678 | UUGCUUUUAUAGUAAUUUC | 1247 |
| NM_001735.2_781-799_s | 781-799 | AAAGCAAGAUAUUUUUAUA | 679 | UAUAAAAAUAUCUUGCUUU | 1248 |
| NM_001735.2_789-807_s | 789-807 | AUAUUUUUAUAAUAAAGUA | 680 | UACUUUAUUAUAAAAAUAU | 1249 |
| NM_001735.2_803-821_s | 803-821 | AAGUAGUCACUGAGGCUGA | 681 | UCAGCCUCAGUGACUACUU | 1250 |
| NM_001735.2_810-828_s | 810-828 | CACUGAGGCUGACGUUUAU | 682 | AUAAACGUCAGCCUCAGUG | 1251 |
| NM_001735.2_822-840_s | 822-840 | CGUUUAUAUCACAUUUGGA | 683 | UCCAAAUGUGAUAUAAACG | 1252 |
| NM_001735.2_831-849_s | 831-849 | CACAUUUGGAAUAAGAGAA | 684 | UUCUCUUAUUCCAAAUGUG | 1253 |
| NM_001735.2_840-858_s | 840-858 | AAUAAGAGAAGACUUAAAA | 685 | UUUUAAGUCUUCUCUUAUU | 1254 |
| NM_001735.2_852-870_s | 852-870 | CUUAAAAGAUGAUCAAAAA | 686 | UUUUUGAUCAUCUUUUAAG | 1255 |
| NM_001735.2_859-877_s | 859-877 | GAUGAUCAAAAAGAAAUGA | 687 | UCAUUUCUUUUUGAUCAUC | 1256 |
| NM_001735.2_872-890_s | 872-890 | AAAUGAUGCAAACAGCAAU | 688 | AUUGCUGUUUGCAUCAUUU | 1257 |
| NM_001735.2_883-901_s | 883-901 | ACAGCAAUGCAAAACACAA | 689 | UUGUGUUUUGCAUUGCUGU | 1258 |
| NM_001735.2_893-911_s | 893-911 | AAAACACAAUGUUGAUAAA | 690 | UUUAUCAACAUUGUGUUUU | 1259 |
| NM_001735.2_899-917_s | 899-917 | CAAUGUUGAUAAAUGGAAU | 691 | AUUCCAUUUAUCAACAUUG | 1260 |
| NM_001735.2_913-931_s | 913-931 | GGAAUUGCUCAAGUCACAU | 692 | AUGUGACUUGAGCAAUUCC | 1261 |
| NM_001735.2_919-937_s | 919-937 | GCUCAAGUCACAUUUGAUU | 693 | AAUCAAAUGUGACUUGAGC | 1262 |
| NM_001735.2_930-948_s | 930-948 | AUUUGAUUCUGAAACAGCA | 694 | UGCUGUUUCAGAAUCAAAU | 1263 |
| NM_001735.2_939-957_s | 939-957 | UGAAACAGCAGUCAAAGAA | 695 | UUCUUUGACUGCUGUUUCA | 1264 |
| NM_001735.2_951-969_s | 951-969 | CAAAGAACUGUCAUACUAC | 696 | GUAGUAUGACAGUUCUUUG | 1265 |
| NM_001735.2_962-980_s | 962-980 | CAUACUACAGUUUAGAAGA | 697 | UCUUCUAAACUGUAGUAUG | 1266 |
| NM_001735.2_969-987_s | 969-987 | CAGUUUAGAAGAUUUAAAC | 698 | GUUUAAAUCUUCUAAACUG | 1267 |
| NM_001735.2_983-1001_s | 983-1001 | UAAACAACAAGUACCUUUA | 699 | UAAAGGUACUUGUUGUUUA | 1268 |
| NM_001735.2_990-1008_s | 990-1008 | CAAGUACCUUUAUAUUGCU | 700 | AGCAAUAUAAAGGUACUUG | 1269 |
| NM_001735.2_1002-1020_s | 1002-1020 | UAUUGCUGUAACAGUCAUA | 701 | UAUGACUGUUACAGCAAUA | 1270 |
| NM_001735.2_1011-1029_s | 1011-1029 | AACAGUCAUAGAGUCUACA | 702 | UGUAGACUCUAUGACUGUU | 1271 |
| NM_001735.2_1020-1038_s | 1020-1038 | AGAGUCUACAGGUGGAUUU | 703 | AAAUCCACCUGUAGACUCU | 1272 |
| NM_001735.2_1033-1051_s | 1033-1051 | GGAUUUUCUGAAGAGGCAG | 704 | CUGCCUCUUCAGAAAAUCC | 1273 |
| NM_001735.2_1042-1060_s | 1042-1060 | GAAGAGGCAGAAAUACCUG | 705 | CAGGUAUUUCUGCCUCUUC | 1274 |
| NM_001735.2_1050-1068_s | 1050-1068 | AGAAAUACCUGGCAUCAAA | 706 | UUUGAUGCCAGGUAUUUCU | 1275 |
| NM_001735.2_1061-1079_s | 1061-1079 | GCAUCAAAUAUGUCCUCUC | 707 | GAGAGGACAUAUUUGAUGC | 1276 |
| NM_001735.2_1071-1089_s | 1071-1089 | UGUCCUCUCUCCCUACAAA | 708 | UUUGUAGGGAGAGAGGACA | 1277 |
| NM_001735.2_1092-1110_s | 1092-1110 | GAAUUUGGUUGCUACUCCU | 709 | AGGAGUAGCAACCAAAUUC | 1278 |
| NM_001735.2_1102-1120_s | 1102-1120 | GCUACUCCUCUUUUCCUGA | 710 | UCAGGAAAAGAGGAGUAGC | 1279 |
| NM_001735.2_1109-1127_s | 1109-1127 | CUCUUUUCCUGAAGCCUGG | 711 | CCAGGCUUCAGGAAAAGAG | 1280 |
| NM_001735.2_1123-1141_s | 1123-1141 | CCUGGGAUUCCAUAUCCCA | 712 | UGGGAUAUGGAAUCCCAGG | 1281 |
| NM_001735.2_1133-1151_s | 1133-1151 | CAUAUCCCAUCAAGGUGCA | 713 | UGCACCUUGAUGGGAUAUG | 1282 |
| NM_001735.2_1139-1157_s | 1139-1157 | CCAUCAAGGUGCAGGUUAA | 714 | UUAACCUGCACCUUGAUGG | 1283 |
| NM_001735.2_1150-1168_s | 1150-1168 | CAGGUUAAAGAUUCGCUUG | 715 | CAAGCGAAUCUUUAACCUG | 1284 |
| NM_001735.2_1161-1179_s | 1161-1179 | UUCGCUUGACCAGUUGGUA | 716 | UACCAACUGGUCAAGCGAA | 1285 |
| NM_001735.2_1170-1188_s | 1170-1188 | CCAGUUGGUAGGAGGAGUC | 717 | GACUCCUCCUACCAACUGG | 1286 |
| NM_001735.2_1180-1198_s | 1180-1198 | GGAGGAGUCCCAGUAACAC | 718 | GUGUUACUGGGACUCCUCC | 1287 |
| NM_001735.2_1190-1208_s | 1190-1208 | CAGUAACACUGAAUGCACA | 719 | UGUGCAUUCAGUGUUACUG | 1288 |
| NM_001735.2_1200-1218_s | 1200-1218 | GAAUGCACAAACAAUUGAU | 720 | AUCAAUUGUUUGUGCAUUC | 1289 |
| NM_001735.2_1209-1227_s | 1209-1227 | AACAAUUGAUGUAAACCAA | 721 | UUGGUUUACAUCAAUUGUU | 1290 |
| NM_001735.2_1220-1238_s | 1220-1238 | UAAACCAAGAGACAUCUGA | 722 | UCAGAUGUCUCUUGGUUUA | 1291 |
| NM_001735.2_1232-1250_s | 1232-1250 | CAUCUGACUUGGAUCCAAG | 723 | CUUGGAUCCAAGUCAGAUG | 1292 |
| NM_001735.2_1243-1261_s | 1243-1261 | GAUCCAAGCAAAAGUGUAA | 724 | UUACACUUUUGCUUGGAUC | 1293 |
| NM_001735.2_1251-1269_s | 1251-1269 | CAAAAGUGUAACACGUGUU | 725 | AACACGUGUUACACUUUUG | 1294 |
| NM_001735.2_1260-1278_s | 1260-1278 | AACACGUGUUGAUGAUGGA | 726 | UCCAUCAUCAACACGUGUU | 1295 |
| NM_001735.2_1272-1290_s | 1272-1290 | UGAUGGAGUAGCUUCCUUU | 727 | AAAGGAAGCUACUCCAUCA | 1296 |
| NM_001735.2_1279-1297_s | 1279-1297 | GUAGCUUCCUUUGUGCUUA | 728 | UAAGCACAAAGGAAGCUAC | 1297 |
| NM_001735.2_1293-1311_s | 1293-1311 | GCUUAAUCUCCCAUCUGGA | 729 | UCCAGAUGGGAGAUUAAGC | 1298 |
| NM_001735.2_1303-1321_s | 1303-1321 | CCAUCUGGAGUGACGGUGC | 730 | GCACCGUCACUCCAGAUGG | 1299 |
| NM_001735.2_1313-1331_s | 1313-1331 | UGACGGUGCUGGAGUUUAA | 731 | UUAAACUCCAGCACCGUCA | 1300 |
| NM_001735.2_1320-1338_s | 1320-1338 | GCUGGAGUUUAAUGUCAAA | 732 | UUUGACAUUAAACUCCAGC | 1301 |
| NM_001735.2_1332-1350_s | 1332-1350 | UGUCAAAACUGAUGCUCCA | 733 | UGGAGCAUCAGUUUUGACA | 1302 |
| NM_001735.2_1342-1360_s | 1342-1360 | GAUGCUCCAGAUCUUCCAG | 734 | CUGGAAGAUCUGGAGCAUC | 1303 |
| NM_001735.2_1349-1367_s | 1349-1367 | CAGAUCUUCCAGAAGAAAA | 735 | UUUUCUUCUGGAAGAUCUG | 1304 |
| NM_001735.2_1362-1380_s | 1362-1380 | AGAAAAUCAGGCCAGGGAA | 736 | UUCCCUGGCCUGAUUUUCU | 1305 |
| NM_001735.2_1371-1389_s | 1371-1389 | GGCCAGGGAAGGUUACCGA | 737 | UCGGUAACCUUCCCUGGCC | 1306 |
| NM_001735.2_1382-1400_s | 1382-1400 | GUUACCGAGCAAUAGCAUA | 738 | UAUGCUAUUGCUCGGUAAC | 1307 |
| NM_001735.2_1393-1411_s | 1393-1411 | AUAGCAUACUCAUCUCUCA | 739 | UGAGAGAUGAGUAUGCUAU | 1308 |
| NM_001735.2_1399-1417_s | 1399-1471 | UACUCAUCUCUCAGCCAAA | 740 | UUUGGCUGAGAGAUGAGUA | 1309 |
| NM_001735.2_1412-1430_s | 1412-1430 | GCCAAAGUUACCUUUAUAU | 741 | AUAUAAAGGUAACUUUGGC | 1310 |
| NM_001735.2_1422-1440_s | 1422-1440 | CCUUUAUAUUGAUUGGACU | 742 | AGUCCAAUCAAUAUAAAGG | 1311 |
| NM_001735.2_1432-1450_s | 1432-1450 | GAUUGGACUGAUAACCAUA | 743 | UAUGGUUAUCAGUCCAAUC | 1312 |
| NM_001735.2_1439-1457_s | 1439-1457 | CUGAUAACCAUAAGGCUUU | 744 | AAAGCCUUAUGGUUAUCAG | 1313 |
| NM_001735.2_1451-1469_s | 1451-1469 | AGGCUUUGCUAGUGGGAGA | 745 | UCUCCCACUAGCAAAGCCU | 1314 |
| NM_001735.2_1462-1480_s | 1462-1480 | GUGGGAGAACAUCUGAAUA | 746 | UAUUCAGAUGUUCUCCCAC | 1315 |
| NM_001735.2_1471-1489_s | 1471-1489 | CAUCUGAAUAUUAUUGUUA | 747 | UAACAAUAAUAUUCAGAUG | 1316 |
| NM_001735.2_1479-1497_s | 1479-1497 | UAUUAUUGUUACCCCCAAA | 748 | UUUGGGGGUAACAAUAAUA | 1317 |
| NM_001735.2_1492-1510_s | 1492-1510 | CCCAAAAGCCCAUAUAUUG | 749 | CAAUAUAUGGGCUUUUGGG | 1318 |
| NM_001735.2_1493-1511_s | 1493-1511 | CCAAAAGCCCAUAUAUUGA | 750 | UCAAUAUAUGGGCUUUUGG | 1319 |
| NM_001735.2_1494-1512_s | 1494-1512 | CAAAAGCCCAUAUAUUGAC | 751 | GUCAAUAUAUGGGCUUUUG | 1320 |
| NM_001735.2_1495-1513_s | 1495-1513 | AAAAGCCCAUAUAUUGACA | 752 | UGUCAAUAUAUGGGCUUUU | 1321 |
| NM_001735.2_1496-1514_s | 1496-1514 | AAAGCCCAUAUAUUGACAA | 753 | UUGUCAAUAUAUGGGCUUU | 1322 |
| NM_001735.2_1497-1515_s | 1497-1515 | AAGCCCAUAUAUUGACAAA | 754 | UUUGUCAAUAUAUGGGCUU | 1323 |
| NM_001735.2_1498-1516_s | 1498-1516 | AGCCCAUAUAUUGACAAAA | 755 | UUUUGUCAAUAUAUGGGCU | 1324 |
| NM_001735.2_1499-1517_s | 1499-1517 | GCCCAUAUAUUGACAAAAU | 756 | AUUUUGUCAAUAUAUGGGC | 1325 |
| NM_001735.2_1500-1518_s | 1500-1518 | CCCAUAUAUUGACAAAAUA | 757 | UAUUUUGUCAAUAUAUGGG | 1326 |
| NM_001735.2_1501-1519_s | 1501-1519 | CCAUAUAUUGACAAAAUAA | 758 | UUAUUUUGUCAAUAUAUGG | 1327 |
| NM_001735.2_1502-1520_s | 1502-1520 | CAUAUAUUGACAAAAUAAC | 759 | GUUAUUUUGUCAAUAUAUG | 1328 |
| NM_001735.2_1503-1521_s | 1503-1521 | AUAUAUUGACAAAAUAACU | 760 | AGUUAUUUUGUCAAUAUAU | 1329 |
| NM_001735.2_1504-1522_s | 1504-1522 | UAUAUUGACAAAAUAACUC | 761 | GAGUUAUUUUGUCAAUAUA | 1330 |
| NM_001735.2_1505-1523_s | 1505-1523 | AUAUUGACAAAAUAACUCA | 762 | UGAGUUAUUUUGUCAAUAU | 1331 |
| NM_001735.2_1506-1524_s | 1506-1524 | UAUUGACAAAAUAACUCAC | 763 | GUGAGUUAUUUUGUCAAUA | 1332 |
| NM_001735.2_1507-1525_s | 1507-1525 | AUUGACAAAAUAACUCACU | 764 | AGUGAGUUAUUUUGUCAAU | 1333 |
| NM_001735.2_1508-1526_s | 1508-1526 | UUGACAAAAUAACUCACUA | 765 | UAGUGAGUUAUUUUGUCAA | 1334 |
| NM_001735.2_1509-1527_s | 1509-1527 | UGACAAAAUAACUCACUAU | 766 | AUAGUGAGUUAUUUUGUCA | 1335 |
| NM_001735.2_1510-1528_s | 1510-1528 | GACAAAAUAACUCACUAUA | 767 | UAUAGUGAGUUAUUUUGUC | 1336 |
| NM_001735.2_1513-1531_s | 1513-1531 | AAAAUAACUCACUAUAAUU | 768 | AAUUAUAGUGAGUUAUUUU | 1337 |
| NM_001735.2_1514-1532_s | 1514-1532 | AAAUAACUCACUAUAAUUA | 769 | UAAUUAUAGUGAGUUAUUU | 1338 |
| NM_001735.2_1515-1533_s | 1515-1533 | AAUAACUCACUAUAAUUAC | 770 | GUAAUUAUAGUGAGUUAUU | 1339 |
| NM_001735.2_1516-1534_s | 1516-1534 | AUAACUCACUAUAAUUACU | 771 | AGUAAUUAUAGUGAGUUAU | 1340 |
| NM_001735.2_1518-1536_s | 1518-1536 | AACUCACUAUAAUUACUUG | 772 | CAAGUAAUUAUAGUGAGUU | 1341 |
| NM_001735.2_1519-1537_s | 1519-1537 | ACUCACUAUAAUUACUUGA | 773 | UCAAGUAAUUAUAGUGAGU | 1342 |
| NM_001735.2_1520-1538_s | 1520-1538 | CUCACUAUAAUUACUUGAU | 774 | AUCAAGUAAUUAUAGUGAG | 1343 |
| NM_001735.2_1521-1539_s | 1521-1539 | UCACUAUAAUUACUUGAUU | 775 | AAUCAAGUAAUUAUAGUGA | 1344 |
| NM_001735.2_1523-1541_s | 1523-1541 | ACUAUAAUUACUUGAUUUU | 776 | AAAAUCAAGUAAUUAUAGU | 1345 |
| NM_001735.2_1524-1542_s | 1524-1542 | CUAUAAUUACUUGAUUUUA | 777 | UAAAAUCAAGUAAUUAUAG | 1346 |
| NM_001735.2_1525-1543_s | 1525-1543 | UAUAAUUACUUGAUUUUAU | 778 | AUAAAAUCAAGUAAUUAUA | 1347 |
| NM_001735.2_1526-1544_s | 1526-1544 | AUAAUUACUUGAUUUUAUC | 779 | GAUAAAAUCAAGUAAUUAU | 1348 |
| NM_001735.2_1527-1545_s | 1527-1545 | UAAUUACUUGAUUUUAUCC | 780 | GGAUAAAAUCAAGUAAUUA | 1349 |
| NM_001735.2_1528-1546_s | 1528-1546 | AAUUACUUGAUUUUAUCCA | 781 | UGGAUAAAAUCAAGUAAUU | 1350 |
| NM_001735.2_1529-1547_s | 1529-1547 | AUUACUUGAUUUUAUCCAA | 782 | UUGGAUAAAAUCAAGUAAU | 1351 |
| NM_001735.2_1540-1558_s | 1540-1558 | UUAUCCAAGGGCAAAAUUA | 783 | UAAUUUUGCCCUUGGAUAA | 1352 |
| NM_001735.2_1550-1568_s | 1550-1568 | GCAAAAUUAUCCACUUUGG | 784 | CCAAAGUGGAUAAUUUUGC | 1353 |
| NM_001735.2_1561-1579_s | 1561-1579 | CACUUUGGCACGAGGGAGA | 785 | UCUCCCUCGUGCCAAAGUG | 1354 |
| NM_001735.2_1571-1589_s | 1571-1589 | CGAGGGAGAAAUUUUCAGA | 786 | UCUGAAAAUUUCUCCCUCG | 1355 |
| NM_001735.2_1581-1599_s | 1581-1599 | AUUUUCAGAUGCAUCUUAU | 787 | AUAAGAUGCAUCUGAAAAU | 1356 |
| NM_001735.2_1591-1609_s | 1591-1609 | GCAUCUUAUCAAAGUAUAA | 788 | UUAUACUUUGAUAAGAUGC | 1357 |
| NM_001735.2_1600-1618_s | 1600-1618 | CAAAGUAUAAACAUUCCAG | 789 | CUGGAAUGUUUAUACUUUG | 1358 |
| NM_001735.2_1612-1630_s | 1612-1630 | AUUCCAGUAACACAGAACA | 790 | UGUUCUGUGUUACUGGAAU | 1359 |
| NM_001735.2_1622-1640_s | 1622-1640 | CACAGAACAUGGUUCCUUC | 791 | GAAGGAACCAUGUUCUGUG | 1360 |
| NM_001735.2_1632-1650_s | 1632-1560 | GGUUCCUUCAUCCCGACUU | 792 | AAGUCGGGAUGAAGGAACC | 1361 |
| NM_001735.2_1643-1661_s | 1643-1661 | CCCGACUUCUGGUCUAUUA | 793 | UAAUAGACCAGAAGUCGGG | 1362 |
| NM_001735.2_1653-1671_s | 1653-1671 | GGUCUAUUACAUCGUCACA | 794 | UGUGACGAUGUAAUAGACC | 1363 |
| NM_001735.2_1663-1681_s | 1663-1681 | AUCGUCACAGGAGAACAGA | 795 | UCUGUUCUCCUGUGACGAU | 1364 |
| NM_001735.2_1670-1688_s | 1670-1688 | CAGGAGAACAGACAGCAGA | 796 | UCUGCUGUCUGUUCUCCUG | 1365 |
| NM_001735.2_1682-1700_s | 1682-1700 | CAGCAGAAUUAGUGUCUGA | 797 | UCAGACACUAAUUCUGCUG | 1366 |
| NM_001735.2_1693-1711_s | 1693-1711 | GUGUCUGAUUCAGUCUGGU | 798 | ACCAGACUGAAUCAGACAC | 1367 |
| NM_001735.2_1703-1721_s | 1703-1721 | CAGUCUGGUUAAAUAUUGA | 799 | UCAAUAUUUAACCAGACUG | 1368 |
| NM_001735.2_1710-1728_s | 1710-1728 | GUUAAAUAUUGAAGAAAAA | 800 | UUUUUCUUCAAUAUUUAAC | 1369 |
| NM_001735.2_1722-1740_s | 1722-1740 | AGAAAAAUGUGGCAACCAG | 801 | CUGGUUGCCACAUUUUUCU | 1370 |
| NM_001735.2_1733-1751_s | 1733-1751 | GCAACCAGCUCCAGGUUCA | 802 | UGAACCUGGAGCUGGUUGC | 1371 |
| NM_001735.2_1740-1758_s | 1740-1758 | GCUCCAGGUUCAUCUGUCU | 803 | AGACAGAUGAACCUGGAGC | 1372 |
| NM_001735.2_1751-1769_s | 1751-1769 | AUCUGUCUCCUGAUGCAGA | 804 | UCUGCAUCAGGAGACAGAU | 1373 |
| NM_001735.2_1762-1780_s | 1762-1780 | GAUGCAGAUGCAUAUUCUC | 805 | GAGAAUAUGCAUCUGCAUC | 1374 |
| NM_001735.2_1771-1789_s | 1771-1789 | GCAUAUUCUCCAGGCCAAA | 806 | UUUGGCCUGGAGAAUAUGC | 1375 |
| NM_001735.2_1782-1800_s | 1782-1800 | AGGCCAAACUGUGUCUCUU | 807 | AAGAGACACAGUUUGGCCU | 1376 |
| NM_001735.2_1792-1810_s | 1792-1810 | GUGUCUCUUAAUAUGGCAA | 808 | UUGCCAUAUUAAGAGACAC | 1377 |
| NM_001735.2_1799-1817_s | 1799-1817 | UUAAUAUGGCAACUGGAAU | 809 | AUUCCAGUUGCCAUAUUAA | 1378 |
| NM_001735.2_1809-1827_s | 1809-1827 | AACUGGAAUGGAUUCCUGG | 810 | CCAGGAAUCCAUUCCAGUU | 1379 |
| NM_001735.2_1821-1839_s | 1821-1839 | UUCCUGGGUGGCAUUAGCA | 811 | UGCUAAUGCCACCCAGGAA | 1380 |
| NM_001735.2_1830-1848_s | 1830-1848 | GGCAUUAGCAGCAGUGGAC | 812 | GUCCACUGCUGCUAAUGCC | 1381 |
| NM_001735.2_1842-1860_s | 1842-1860 | AGUGGACAGUGCUGUGUAU | 813 | AUACACAGCACUGUCCACU | 1382 |
| NM_001735.2_1852-1870_s | 1852-1870 | GCUGUGUAUGGAGUCCAAA | 814 | UUUGGACUCCAUACACAGC | 1383 |
| NM_001735.2_1863-1881_s | 1863-1881 | AGUCCAAAGAGGAGCCAAA | 815 | UUUGGCUCCUCUUUGGACU | 1384 |
| NM_001735.2_1870-1888_s | 1870-1888 | AGAGGAGCCAAAAAGCCCU | 816 | AGGGCUUUUUGGCUCCUCU | 1385 |
| NM_001735.2_1883-1901_s | 1883-1901 | AGCCCUUGGAAAGAGUAUU | 817 | AAUACUCUUUCCAAGGGCU | 1386 |
| NM_001735.2_1893-1911_s | 1893-1911 | AAGAGUAUUUCAAUUCUUA | 818 | UAAGAAUUGAAAUACUCUU | 1387 |
| NM_001735.2_1900-1918_s | 1900-1918 | UUUCAAUUCUUAGAGAAGA | 819 | UCUUCUCUAAGAAUUGAAA | 1388 |
| NM_001735.2_1912-1930_s | 1912-1930 | GAGAAGAGUGAUCUGGGCU | 820 | AGCCCAGAUCACUCUUCUC | 1389 |
| NM_001735.2_1920-1938_s | 1920-1938 | UGAUCUGGGCUGUGGGGCA | 821 | UGCCCCACAGCCCAGAUCA | 1390 |
| NM_001735.2_1933-1951_s | 1933-1951 | GGGGCAGGUGGUGGCCUCA | 822 | UGAGGCCACCACCUGCCCC | 1391 |
| NM_001735.2_1943-1961_s | 1943-1961 | GUGGCCUCAACAAUGCCAA | 823 | UUGGCAUUGUUGAGGCCAC | 1392 |
| NM_001735.2_1950-1968_s | 1950-1968 | CAACAAUGCCAAUGUGUUC | 824 | GAACACAUUGGCAUUGUUG | 1393 |
| NM_001735.2_1959-1977_s | 1959-1977 | CAAUGUGUUCCACCUAGCU | 825 | AGCUAGGUGGAACACAUUG | 1394 |
| NM_001735.2_1969-1987_s | 1969-1987 | CACCUAGCUGGACUUACCU | 826 | AGGUAAGUCCAGCUAGGUG | 1395 |
| NM_001735.2_1979-1997_s | 1979-1997 | GACUUACCUUCCUCACUAA | 827 | UUAGUGAGGAAGGUAAGUC | 1396 |
| NM_001735.2_1991-2009_s | 1991-2009 | UCACUAAUGCAAAUGCAGA | 828 | UCUGCAUUUGCAUUAGUGA | 1397 |
| NM_001735.2_2001-2019_s | 2001-2019 | AAAUGCAGAUGACUCCCAA | 829 | UUGGGAGUCAUCUGCAUUU | 1398 |
| NM_001735.2_2013-2031_s | 2013-2013 | CUCCCAAGAAAAUGAUGAA | 830 | UUCAUCAUUUUCUUGGGAG | 1399 |
| NM_001735.2_2032-2050_s | 2032-2050 | CCUUGUAAAGAAAUUCUCA | 831 | UGAGAAUUUCUUUACAAGG | 1400 |
| NM_001735.2_2043-2061_s | 2043-2061 | AAUUCUCAGGCCAAGAAGA | 832 | UCUUCUUGGCCUGAGAAUU | 1401 |
| NM_001735.2_2053-2071_s | 2053-2071 | CCAAGAAGAACGCUGCAAA | 833 | UUUGCAGCGUUCUUCUUGG | 1402 |
| NM_001735.2_2063-2081_s | 2063-2081 | CGCUGCAAAAGAAGAUAGA | 834 | UCUAUCUUCUUUUGCAGCG | 1403 |
| NM_001735.2_2070-2088_s | 2070-2088 | AAAGAAGAUAGAAGAAAUA | 835 | UAUUUCUUCUAUCUUCUUU | 1404 |
| NM_001735.2_2082-2100_s | 2082-2100 | AGAAAUAGCUGCUAAAUAU | 836 | AUAUUUAGCAGCUAUUUCU | 1405 |
| NM_001735.2_2089-2107_s | 2089-2107 | GCUGCUAAAUAUAAACAUU | 837 | AAUGUUUAUAUUUAGCAGC | 1406 |
| NM_001735.2_2103-2121_s | 2103-2121 | ACAUUCAGUAGUGAAGAAA | 838 | UUUCUUCACUACUGAAUGU | 1407 |
| NM_001735.2_2110-2128_s | 2110-2128 | GUAGUGAAGAAAUGUUGUU | 839 | AACAACAUUUCUUCACUAC | 1408 |
| NM_001735.2_2119-2137_s | 2119-2137 | AAAUGUUGUUACGAUGGAG | 840 | CUCCAUCGUAACAACAUUU | 1409 |
| NM_001735.2_2130-2148_s | 2130-2148 | CGAUGGAGCCUGCGUUAAU | 841 | AUUAACGCAGGCUCCAUCG | 1410 |
| NM_001735.2_2142-2160_s | 2142-2160 | CGUUAAUAAUGAUGAAACC | 842 | GGUUUCAUCAUUAUUAACG | 1411 |
| NM_001735.2_2150-2168_s | 2150-2168 | AUGAUGAAACCUGUGAGCA | 843 | UGCUCACAGGUUUCAUCAU | 1412 |
| NM_001735.2_2160-2178_s | 2160-2178 | CUGUGAGCAGCGAGCUGCA | 844 | UGCAGCUCGCUGCUCACAG | 1413 |
| NM_001735.2_2170-2188_s | 2170-2188 | CGAGCUGCACGGAUUAGUU | 845 | AACUAAUCCGUGCAGCUCG | 1414 |
| NM_001735.2_2180-2198_s | 2180-2198 | GGAUUAGUUUAGGGCCAAG | 846 | CUUGGCCCUAAACUAAUCC | 1415 |
| NM_001735.2_2191-2209_s | 2191-2209 | GGGCCAAGAUGCAUCAAAG | 847 | CUUUGAUGCAUCUUGGCCC | 1416 |
| NM_001735.2_2202-2220_s | 2202-2220 | CAUCAAAGCUUUCACUGAA | 848 | UUCAGUGAAAGCUUUGAUG | 1417 |
| NM_001735.2_2209-2227_s | 2209-2227 | GCUUUCACUGAAUGUUGUG | 849 | CACAACAUUCAGUGAAAGC | 1418 |
| NM_001735.2_2219-2237_s | 2219-2237 | AAUGUUGUGUCGUCGCAAG | 850 | CUUGCGACGACACAACAUU | 1419 |
| NM_001735.2_2229-2247_s | 2229-2247 | CGUCGCAAGCCAGCUCCGU | 851 | ACGGAGCUGGCUUGCGACG | 1420 |
| NM_001735.2_2241-2259_s | 2241-2259 | GCUCCGUGCUAAUAUCUCU | 852 | AGAGAUAUUAGCACGGAGC | 1421 |
| NM_001735.2_2249-2267_s | 2249-2267 | CUAAUAUCUCUCAUAAAGA | 853 | UCUUUAUGAGAGAUAUUAG | 1422 |
| NM_001735.2_2263-2281_s | 2263-2281 | AAAGACAUGCAAUUGGGAA | 854 | UUCCCAAUUGCAUGUCUUU | 1423 |
| NM_001735.2_2272-2290_s | 2272-2290 | CAAUUGGGAAGGCUACACA | 855 | UGUGUAGCCUUCCCAAUUG | 1424 |
| NM_001735.2_2283-2301_s | 2283-2301 | GCUACACAUGAAGACCCUG | 856 | CAGGGUCUUCAUGUGUAGC | 1425 |
| NM_001735.2_2289-2307_s | 2289-2307 | CAUGAAGACCCUGUUACCA | 857 | UGGUAACAGGGUCUUCAUG | 1426 |
| NM_001735.2_2303-2321_s | 2303-2321 | UACCAGUAAGCAAGCCAGA | 858 | UCUGGCUUGCUUACUGGUA | 1427 |
| NM_001735.2_2311-2329_s | 2311-2329 | AGCAAGCCAGAAAUUCGGA | 859 | UCCGAAUUUCUGGCUUGCU | 1428 |
| NM_001735.2_2319-2337_s | 2319-2337 | AGAAAUUCGGAGUUAUUUU | 860 | AAAAUAACUCCGAAUUUCU | 1429 |
| NM_001735.2_2329-2347_s | 2329-2347 | AGUUAUUUUCCAGAAAGCU | 861 | AGCUUUCUGGAAAAUAACU | 1430 |
| NM_001735.2_2339-2357_s | 2339-2357 | CAGAAAGCUGGUUGUGGGA | 862 | UCCCACAACCAGCUUUCUG | 1431 |
| NM_001735.2_2352-2370_s | 2352-2370 | GUGGGAAGUUCAUCUUGUU | 863 | AACAAGAUGAACUUCCCAC | 1432 |
| NM_001735.2_2361-2379_s | 2361-2379 | UCAUCUUGUUCCCAGAAGA | 864 | UCUUCUGGGAACAAGAUGA | 1433 |
| NM_001735.2_2372-2390_s | 2372-2390 | CCAGAAGAAAACAGUUGCA | 865 | UGCAACUGUUUUCUUCUGG | 1434 |
| NM_001735.2_2383-2401_s | 2383-2401 | CAGUUGCAGUUUGCCCUAC | 866 | GUAGGGCAAACUGCAACUG | 1435 |
| NM_001735.2_2389-2407_s | 2389-2407 | CAGUUUGCCCUACCUGAUU | 867 | AAUCAGGUAGGGCAAACUG | 1436 |
| NM_001735.2_2401-2419_s | 2401-2419 | CCUGAUUCUCUAACCACCU | 868 | AGGUGGUUAGAGAAUCAGG | 1437 |
| NM_001735.2_2413-2431_s | 2413-2431 | ACCACCUGGGAAAUUCAAG | 869 | CUUGAAUUUCCCAGGUGGU | 1438 |
| NM_001735.2_2422-2440_s | 2422-2440 | GAAAUUCAAGGCGUUGGCA | 870 | UGCCAACGCCUUGAAUUUC | 1439 |
| NM_001735.2_2433-2451_s | 2433-2451 | CGUUGGCAUUUCAAACACU | 871 | AGUGUUUGAAAUGCCAACG | 1440 |
| NM_001735.2_2439-2457_s | 2439-2457 | CAUUUCAAACACUGGUAUA | 872 | UAUACCAGUGUUUGAAAUG | 1441 |
| NM_001735.2_2453-2471_s | 2453-2471 | GUAUAUGUGUUGCUGAUAC | 873 | GUAUCAGCAACACAUAUAC | 1442 |
| NM_001735.2_2463-2481_s | 2463-2481 | UGCUGAUACUGUCAAGGCA | 874 | UGCCUUGACAGUAUCAGCA | 1443 |
| NM_001735.2_2471-2489_s | 2471-2489 | CUGUCAAGGCAAAGGUGUU | 875 | AACACCUUUGCCUUGACAG | 1444 |
| NM_001735.2_2483-2501_s | 2483-2501 | AGGUGUUCAAAGAUGUCUU | 876 | AAGACAUCUUUGAACACCU | 1445 |
| NM_001735.2_2490-2508_s | 2490-2508 | CAAAGAUGUCUUCCUGGAA | 877 | UUCCAGGAAGACAUCUUUG | 1446 |
| NM_001735.2_2499-2517_s | 2499-2517 | CUUCCUGGAAAUGAAUAUA | 878 | UAUAUUCAUUUCCAGGAAG | 1447 |
| NM_001735.2_2511-2529_s | 2511-2529 | GAAUAUACCAUAUUCUGUU | 879 | AACAGAAUAUGGUAUAUUC | 1448 |
| NM_001735.2_2520-2538_s | 2520-2538 | AUAUUCUGUUGUACGAGGA | 880 | UCCUCGUACAACAGAAUAU | 1449 |
| NM_001735.2_2533-2551_s | 2533-2551 | CGAGGAGAACAGAUCCAAU | 881 | AUUGGAUCUGUUCUCCUCG | 1450 |
| NM_001735.2_2539-2557_s | 2539-2557 | GAACAGAUCCAAUUGAAAG | 882 | CUUUCAAUUGGAUCUGUUC | 1451 |
| NM_001735.2_2553-2571_s | 2553-2571 | GAAAGGAACUGUUUACAAC | 883 | GUUGUAAACAGUUCCUUUC | 1452 |
| NM_001735.2_2560-2578_s | 2560-2578 | ACUGUUUACAACUAUAGGA | 884 | UCCUAUAGUUGUAAACAGU | 1453 |
| NM_001735.2_2569-2587_s | 2569-2587 | AACUAUAGGACUUCUGGGA | 885 | UCCCAGAAGUCCUAUAGUU | 1454 |
| NM_001735.2_2583-2601_s | 2583-2601 | UGGGAUGCAGUUCUGUGUU | 886 | AACACAGAACUGCAUCCCA | 1455 |
| NM_001735.2_2592-2610_s | 2592-2610 | GUUCUGUGUUAAAAUGUCU | 887 | AGACAUUUUAACACAGAAC | 1456 |
| NM_001735.2_2600-2618_s | 2600-2618 | UUAAAAUGUCUGCUGUGGA | 888 | UCCACAGCAGACAUUUUAA | 1457 |
| NM_001735.2_2612-2630_s | 2612-2630 | CUGUGGAGGGAAUCUGCAC | 889 | GUGCAGAUUCCCUCCACAG | 1458 |
| NM_001735.2_2620-2638_s | 2620-2638 | GGAAUCUGCACUUCGGAAA | 890 | UUUCCGAAGUGCAGAUUCC | 1459 |
| NM_001735.2_2633-2651_s | 2633-2651 | CGGAAAGCCCAGUCAUUGA | 891 | UCAAUGACUGGGCUUUCCG | 1460 |
| NM_001735.2_2641-2659_s | 2641-2659 | CCAGUCAUUGAUCAUCAGG | 892 | CCUGAUGAUCAAUGACUGG | 1461 |
| NM_001735.2_2653-2671_s | 2653-2671 | CAUCAGGGCACAAAGUCCU | 893 | AGGACUUUGUGCCCUGAUG | 1462 |
| NM_001735.2_2659-2677_s | 2659-2677 | GGCACAAAGUCCUCCAAAU | 894 | AUUUGGAGGACUUUGUGCC | 1463 |
| NM_001735.2_2673-2691_s | 2673-2691 | CAAAUGUGUGCGCCAGAAA | 895 | UUUCUGGCGCACACAUUUG | 1464 |
| NM_001735.2_2682-2700_s | 2682-2700 | GCGCCAGAAAGUAGAGGGC | 896 | GCCCUCUACUUUCUGGCGC | 1465 |
| NM_001735.2_2691-2709_s | 2691-2709 | AGUAGAGGGCUCCUCCAGU | 897 | ACUGGAGGAGCCCUCUACU | 1466 |
| NM_001735.2_2702-2720_s | 2702-2720 | CCUCCAGUCACUUGGUGAC | 898 | GUCACCAAGUGACUGGAGG | 1467 |
| NM_001735.2_2709-2727_s | 2709-2727 | UCACUUGGUGACAUUCACU | 899 | AGUGAAUGUCACCAAGUGA | 1468 |
| NM_001735.2_2720-2738_s | 2720-2738 | CAUUCACUGUGCUUCCUCU | 900 | AGAGGAAGCACAGUGAAUG | 1469 |
| NM_001735.2_2739-2757_s | 2739-2757 | GGAAAUUGGCCUUCACAAC | 901 | GUUGUGAAGGCCAAUUUCC | 1470 |
| NM_001735.2_2749-2767_s | 2749-2767 | CUUCACAACAUCAAUUUUU | 902 | AAAAAUUGAUGUUGUGAAG | 1471 |
| NM_001735.2_2761-2779_s | 2761-2779 | AAUUUUUCACUGGAGACUU | 903 | AAGUCUCCAGUGAAAAAUU | 1472 |
| NM_001735.2_2770-2788_s | 2770-2788 | CUGGAGACUUGGUUUGGAA | 904 | UUCCAAACCAAGUCUCCAG | 1473 |
| NM_001735.2_2780-2798_s | 2780-2798 | GGUUUGGAAAAGAAAUCUU | 905 | AAGAUUUCUUUUCCAAACC | 1474 |
| NM_001735.2_2793-2811_s | 2793-2811 | AAUCUUAGUAAAAACAUUA | 906 | UAAUGUUUUUACUAAGAUU | 1475 |
| NM_001735.2_2802-2820_s | 2802-2820 | AAAAACAUUACGAGUGGUG | 907 | CACCACUCGUAAUGUUUUU | 1476 |
| NM_001735.2_2813-2831_s | 2813-2831 | GAGUGGUGCCAGAAGGUGU | 908 | ACACCUUCUGGCACCACUC | 1477 |
| NM_001735.2_2823-2841_s | 2823-2841 | AGAAGGUGUCAAAAGGGAA | 909 | UUCCCUUUUGACACCUUCU | 1478 |
| NM_001735.2_2829-2847_s | 2829-2847 | UGUCAAAAGGGAAAGCUAU | 910 | AUAGCUUUCCCUUUUGACA | 1479 |
| NM_001735.2_2843-2861_s | 2843-2861 | GCUAUUCUGGUGUUACUUU | 911 | AAAGUAACACCAGAAUAGC | 1480 |
| NM_001735.2_2852-2870_s | 2852-2870 | GUGUUACUUUGGAUCCUAG | 912 | CUAGGAUCCAAAGUAACAC | 1481 |
| NM_001735.2_2862-2880_s | 2862-2880 | GGAUCCUAGGGGUAUUUAU | 913 | AUAAAUACCCCUAGGAUCC | 1482 |
| NM_001735.2_2872-2890_s | 2872-2890 | GGUAUUUAUGGUACCAUUA | 914 | UAAUGGUACCAUAAAUACC | 1483 |
| NM_001735.2_2882-2900_s | 2882-2900 | GUACCAUUAGCAGACGAAA | 915 | UUUCGUCUGCUAAUGGUAC | 1484 |
| NM_001735.2_2892-2910_s | 2892-2910 | CAGACGAAAGGAGUUCCCA | 916 | UGGGAACUCCUUUCGUCUG | 1485 |
| NM_001735.2_2900-2918_s | 2900-2918 | AGGAGUUCCCAUACAGGAU | 917 | AUCCUGUAUGGGAACUCCU | 1486 |
| NM_001735.2_2909-2927_s | 2909-2927 | CAUACAGGAUACCCUUAGA | 918 | UCUAAGGGUAUCCUGUAUG | 1487 |
| NM_001735.2_2922-2940_s | 2922-2940 | CUUAGAUUUGGUCCCCAAA | 919 | UUUGGGGACCAAAUCUAAG | 1488 |
| NM_001735.2_2933-2951_s | 2933-2951 | UCCCCAAAACAGAAAUCAA | 920 | UUGAUUUCUGUUUUGGGGA | 1489 |
| NM_001735.2_2941-2959_s | 2941-2959 | ACAGAAAUCAAAAGGAUUU | 921 | AAAUCCUUUUGAUUUCUGU | 1490 |
| NM_001735.2_2951-2969_s | 2951-2969 | AAAGGAUUUUGAGUGUAAA | 922 | UUUACACUCAAAAUCCUUU | 1491 |
| NM_001735.2_2962-2980_s | 2962-2980 | AGUGUAAAAGGACUGCUUG | 923 | CAAGCAGUCCUUUUACACU | 1492 |
| NM_001735.2_2969-2987_s | 2969-2987 | AAGGACUGCUUGUAGGUGA | 924 | UCACCUACAAGCAGUCCUU | 1493 |
| NM_001735.2_2980-2998_s | 2980-2998 | GUAGGUGAGAUCUUGUCUG | 925 | CAGACAAGAUCUCACCUAC | 1494 |
| NM_001735.2_2989-3007_s | 2989-3007 | AUCUUGUCUGCAGUUCUAA | 926 | UUAGAACUGCAGACAAGAU | 1495 |
| NM_001735.2_3001-3019_s | 3001-3019 | GUUCUAAGUCAGGAAGGCA | 927 | UGCCUUCCUGACUUAGAAC | 1496 |
| NM_001735.2_3013-3031_s | 3013-3031 | GAAGGCAUCAAUAUCCUAA | 928 | UUAGGAUAUUGAUGCCUUC | 1497 |
| NM_001735.2_3020-3038_s | 3020-3038 | UCAAUAUCCUAACCCACCU | 929 | AGGUGGGUUAGGAUAUUGA | 1498 |
| NM_001735.2_3033-3051_s | 3033-3051 | CCACCUCCCCAAAGGGAGU | 930 | ACUCCCUUUGGGGAGGUGG | 1499 |
| NM_001735.2_3039-3057_s | 3039-3057 | CCCCAAAGGGAGUGCAGAG | 931 | CUCUGCACUCCCUUUGGGG | 1500 |
| NM_001735.2_3050-3068_s | 3050-3068 | GUGCAGAGGCGGAGCUGAU | 932 | AUCAGCUCCGCCUCUGCAC | 1501 |
| NM_001735.2_3060-3078_s | 3060-3078 | GGAGCUGAUGAGCGUUGUC | 933 | GACAACGCUCAUCAGCUCC | 1502 |
| NM_001735.2_3072-3090_s | 3072-3090 | CGUUGUCCCAGUAUUCUAU | 934 | AUAGAAUACUGGGACAACG | 1503 |
| NM_001735.2_3079-3097_s | 3079-3097 | CCAGUAUUCUAUGUUUUUC | 935 | GAAAAACAUAGAAUACUGG | 1504 |
| NM_001735.2_3091-3109_s | 3091-3109 | GUUUUUCACUACCUGGAAA | 936 | UUUCCAGGUAGUGAAAAAC | 1505 |
| NM_001735.2_3102-3120_s | 3102-3120 | CCUGGAAACAGGAAAUCAU | 937 | AUGAUUUCCUGUUUCCAGG | 1506 |
| NM_001735.2_3122-3140_s | 3122-3140 | GGAACAUUUUUCAUUCUGA | 938 | UCAGAAUGAAAAAUGUUCC | 1507 |
| NM_001735.2_3133-3151_s | 3133-3151 | CAUUCUGACCCAUUAAUUG | 939 | CAAUUAAUGGGUCAGAAUG | 1508 |
| NM_001735.2_3142-3160_s | 3142-3160 | CCAUUAAUUGAAAAGCAGA | 940 | UCUGCUUUUCAAUUAAUGG | 1509 |
| NM_001735.2_3153-3171_s | 3153-3171 | AAAGCAGAAACUGAAGAAA | 941 | UUUCUUCAGUUUCUGCUUU | 1510 |
| NM_001735.2_3161-3179_s | 3161-3179 | AACUGAAGAAAAAAUUAAA | 942 | UUUAAUUUUUUCUUCAGUU | 1511 |
| NM_001735.2_3169-3187_s | 3169-3187 | AAAAAAUUAAAAGAAGGGA | 943 | UCCCUUCUUUUAAUUUUUU | 1512 |
| NM_001735.2_3183-3201_s | 3183-3201 | AGGGAUGUUGAGCAUUAUG | 944 | CAUAAUGCUCAACAUCCCU | 1513 |
| NM_001735.2_3192-3210_s | 3192-3210 | GAGCAUUAUGUCCUACAGA | 945 | UCUGUAGGACAUAAUGCUC | 1514 |
| NM_001735.2_3200-3218_s | 3200-3218 | UGUCCUACAGAAAUGCUGA | 946 | UCAGCAUUUCUGUAGGACA | 1515 |
| NM_001735.2_3211-3229_s | 3211-3229 | AAUGCUGACUACUCUUACA | 947 | UGUAAGAGUAGUCAGCAUU | 1516 |
| NM_001735.2_3220-3238_s | 3220-3238 | UACUCUUACAGUGUGUGGA | 948 | UCCACACACUGUAAGAGUA | 1517 |
| NM_001735.2_3229-3247_s | 3229-3247 | AGUGUGUGGAAGGGUGGAA | 949 | UUCCACCCUUCCACACACU | 1518 |
| NM_001735.2_3240-3258_s | 3240-3258 | GGGUGGAAGUGCUAGCACU | 950 | AGUGCUAGCACUUCCACCC | 1519 |
| NM_001735.2_3250-3268_s | 3250-3268 | GCUAGCACUUGGUUAACAG | 951 | CUGUUAACCAAGUGCUAGC | 1520 |
| NM_001735.2_3260-3278_s | 3260-3278 | GGUUAACAGCUUUUGCUUU | 952 | AAAGCAAAAGCUGUUAACC | 1521 |
| NM_001735.2_3273-3291_s | 3273-3291 | UGCUUUAAGAGUACUUGGA | 953 | UCCAAGUACUCUUAAAGCA | 1522 |
| NM_001735.2_3283-3301_s | 3283-3301 | GUACUUGGACAAGUAAAUA | 954 | UAUUUACUUGUCCAAGUAC | 1523 |
| NM_001735.2_3292-3310_s | 3292-3317 | CAAGUAAAUAAAUACGUAG | 955 | CUACGUAUUUAUUUACUUG | 1524 |
| NM_001735.2_3299-3317_s | 3299-3317 | AUAAAUACGUAGAGCAGAA | 956 | UUCUGCUCUACGUAUUUAU | 1525 |
| NM_001735.2_3310-3328_s | 3310-3328 | GAGCAGAACCAAAAUUCAA | 957 | UUGAAUUUUGGUUCUGCUC | 1526 |
| NM_001735.2_3322-3340_s | 3322-3340 | AAUUCAAUUUGUAAUUCUU | 958 | AAGAAUUACAAAUUGAAUU | 1527 |
| NM_001735.2_3332-3350_s | 3332-3350 | GUAAUUCUUUAUUGUGGCU | 959 | AGCCACAAUAAAGAAUUAC | 1528 |
| NM_001735.2_3342-3360_s | 3342-3360 | AUUGUGGCUAGUUGAGAAU | 960 | AUUCUCAACUAGCCACAAU | 1529 |
| NM_001735.2_3349-3367_s | 3349-3367 | CUAGUUGAGAAUUAUCAAU | 961 | AUUGAUAAUUCUCAACUAG | 1530 |
| NM_001735.2_3360-3378_s | 3360-3378 | UUAUCAAUUAGAUAAUGGA | 962 | UCCAUUAUCUAAUUGAUAA | 1531 |
| NM_001735.2_3373-3391_s | 3373-3391 | AAUGGAUCUUUCAAGGAAA | 963 | UUUCCUUGAAAGAUCCAUU | 1532 |
| NM_001735.2_3380-3398_s | 3380-3398 | CUUUCAAGGAAAAUUCACA | 964 | UGUGAAUUUUCCUUGAAAG | 1533 |
| NM_001735.2_3391-3409_s | 3391-3409 | AAUUCACAGUAUCAACCAA | 965 | UUGGUUGAUACUGUGAAUU | 1534 |
| NM_001735.2_3399-3417_s | 3399-3417 | GUAUCAACCAAUAAAAUUA | 966 | UAAUUUUAUUGGUUGAUAC | 1535 |
| NM_001735.2_3411-3429_s | 3411-3429 | AAAAUUACAGGGUACCUUG | 967 | CAAGGUACCCUGUAAUUUU | 1536 |
| NM_001735.2_3419-3437_s | 3419-3437 | AGGGUACCUUGCCUGUUGA | 968 | UCAACAGGCAAGGUACCCU | 1537 |
| NM_001735.2_3433-3451_s | 3433-3451 | GUUGAAGCCCGAGAGAACA | 969 | UGUUCUCUCGGGCUUCAAC | 1538 |
| NM_001735.2_3441-3459_s | 3441-3559 | CCGAGAGAACAGCUUAUAU | 970 | AUAUAAGCUGUUCUCUCGG | 1539 |
| NM_001735.2_3452-3470_s | 3452-3470 | GCUUAUAUCUUACAGCCUU | 971 | AAGGCUGUAAGAUAUAAGC | 1540 |
| NM_001735.2_3460-3478_s | 3460-3478 | CUUACAGCCUUUACUGUGA | 972 | UCACAGUAAAGGCUGUAAG | 1541 |
| NM_001735.2_3482-3500_s | 3482-3500 | GAAUUAGAAAGGCUUUCGA | 973 | UCGAAAGCCUUUCUAAUUC | 1542 |
| NM_001735.2_3492-3510_s | 3492-3510 | GGCUUUCGAUAUAUGCCCC | 974 | GGGGCAUAUAUCGAAAGCC | 1543 |
| NM_001735.2_3499-3517_s | 3499-3517 | GAUAUAUGCCCCCUGGUGA | 975 | UCACCAGGGGGCAUAUAUC | 1544 |
| NM_001735.2_3513-3531_s | 3513-3531 | GGUGAAAAUCGACACAGCU | 976 | AGCUGUGUCGAUUUUCACC | 1545 |
| NM_001735.2_3522-3540_s | 3522-3540 | CGACACAGCUCUAAUUAAA | 977 | UUUAAUUAGAGCUGUGUCG | 1546 |
| NM_001735.2_3529-3547_s | 3529-3547 | GCUCUAAUUAAAGCUGACA | 978 | UGUCAGCUUUAAUUAGAGC | 1547 |
| NM_001735.2_3542-3560_s | 3542-3560 | CUGACAACUUUCUGCUUGA | 979 | UCAAGCAGAAAGUUGUCAG | 1548 |
| NM_001735.2_3549-3567_s | 3549-3567 | CUUUCUGCUUGAAAAUACA | 980 | UGUAUUUUCAAGCAGAAAG | 1549 |
| NM_001735.2_3560-3578_s | 3560-3578 | AAAAUACACUGCCAGCCCA | 981 | UGGGCUGGCAGUGUAUUUU | 1550 |
| NM_001735.2_3573-3591_s | 3573-3591 | AGCCCAGAGCACCUUUACA | 982 | UGUAAAGGUGCUCUGGGCU | 1551 |
| NM_001735.2_3581-3599_s | 3581-3599 | GCACCUUUACAUUGGCCAU | 983 | AUGGCCAAUGUAAAGGUGC | 1552 |
| NM_001735.2_3589-3607_s | 3589-3607 | ACAUUGGCCAUUUCUGCGU | 984 | ACGCAGAAAUGGCCAAUGU | 1553 |
| NM_001735.2_3602-3620_s | 3602-3620 | CUGCGUAUGCUCUUUCCCU | 985 | AGGGAAAGAGCAUACGCAG | 1554 |
| NM_001735.2_3613-3631_s | 3613-3631 | CUUUCCCUGGGAGAUAAAA | 986 | UUUUAUCUCCCAGGGAAAG | 1555 |
| NM_001735.2_3623-3641_s | 3623-3641 | GAGAUAAAACUCACCCACA | 987 | UGUGGGUGAGUUUUAUCUC | 1556 |
| NM_001735.2_3631-3649_s | 3631-3649 | ACUCACCCACAGUUUCGUU | 988 | AACGAAACUGUGGGUGAGU | 1557 |
| NM_001735.2_3640-3658_s | 3640-3658 | CAGUUUCGUUCAAUUGUUU | 989 | AAACAAUUGAACGAAACUG | 1558 |
| NM_001735.2_3650-3668_s | 3650-3668 | CAAUUGUUUCAGCUUUGAA | 990 | UUCAAAGCUGAAACAAUUG | 1559 |
| NM_001735.2_3662-3680_s | 3662-3680 | CUUUGAAGAGAGAAGCUUU | 991 | AAAGCUUCUCUCUUCAAAG | 1560 |
| NM_001735.2_3669-3687_s | 3669-3687 | GAGAGAAGCUUUGGUUAAA | 992 | UUUAACCAAAGCUUCUCUC | 1561 |
| NM_001735.2_3682-3700_s | 3682-3700 | GUUAAAGGUAAUCCACCCA | 993 | UGGGUGGAUUACCUUUAAC | 1562 |
| NM_001735.2_3691-3709_s | 3691-3709 | AAUCCACCCAUUUAUCGUU | 994 | AACGAUAAAUGGGUGGAUU | 1563 |
| NM_001735.2_3699-3717_s | 3699-3717 | CAUUUAUCGUUUUUGGAAA | 995 | UUUCCAAAAACGAUAAAUG | 1564 |
| NM_001735.2_3710-3728_s | 3710-3728 | UUUGGAAAGACAAUCUUCA | 996 | UGAAGAUUGUCUUUCCAAA | 1565 |
| NM_001735.2_3721-3739_s | 3721-3739 | AAUCUUCAGCAUAAAGACA | 997 | UGUCUUUAUGCUGAAGAUU | 1566 |
| NM_001735.2_3730-3748_s | 3730-3748 | CAUAAAGACAGCUCUGUAC | 998 | GUACAGAGCUGUCUUUAUG | 1567 |
| NM_001735.2_3741-3759_s | 3741-3759 | CUCUGUACCUAACACUGGU | 999 | ACCAGUGUUAGGUACAGAG | 1568 |
| NM_001735.2_3752-3770_s | 3752-3770 | ACACUGGUACGGCACGUAU | 1000 | AUACGUGCCGUACCAGUGU | 1569 |
| NM_001735.2_3762-3780_s | 3762-3780 | GGCACGUAUGGUAGAAACA | 1001 | UGUUUCUACCAUACGUGCC | 1570 |
| NM_001735.2_3771-3789_s | 3771-3789 | GGUAGAAACAACUGCCUAU | 1002 | AUAGGCAGUUGUUUCUACC | 1571 |
| NM_001735.2_3779-3797_s | 3779-3797 | CAACUGCCUAUGCUUUACU | 1003 | AGUAAAGCAUAGGCAGUUG | 1572 |
| NM_001735.2_3791-3809_s | 3791-3809 | CUUUACUCACCAGUCUGAA | 1004 | UUCAGACUGGUGAGUAAAG | 1573 |
| NM_001735.2_3803-3821_s | 3803-3821 | GUCUGAACUUGAAAGAUAU | 1005 | AUAUCUUUCAAGUUCAGAC | 1574 |
| NM_001735.2_3809-3827_s | 3809-3827 | ACUUGAAAGAUAUAAAUUA | 1006 | UAAUUUAUAUCUUUCAAGU | 1575 |
| NM_001735.2_3819-3837_s | 3819-3837 | UAUAAAUUAUGUUAACCCA | 1007 | UGGGUUAACAUAAUUUAUA | 1576 |
| NM_001735.2_3829-3847_s | 3829-3847 | GUUAACCCAGUCAUCAAAU | 1008 | AUUUGAUGACUGGGUUAAC | 1577 |
| NM_001735.2_3839-3857_s | 3839-3857 | UCAUCAAAUGGCUAUCAGA | 1009 | UCUGAUAGCCAUUUGAUGA | 1578 |
| NM_001735.2_3851-3869_s | 3851-3869 | UAUCAGAAGAGCAGAGGUA | 1010 | UACCUCUGCUCUUCUGAUA | 1579 |
| NM_001735.2_3863-3881_s | 3863-3881 | AGAGGUAUGGAGGUGGCUU | 1011 | AAGCCACCUCCAUACCUCU | 1580 |
| NM_001735.2_3872-3890_s | 3872-3890 | GAGGUGGCUUUUAUUCAAC | 1012 | GUUGAAUAAAAGCCACCUC | 1581 |
| NM_001735.2_3883-3901_s | 3883-3901 | UAUUCAACCCAGGACACAA | 1013 | UUGUGUCCUGGGUUGAAUA | 1582 |
| NM_001735.2_3893-3911_s | 3893-3911 | AGGACACAAUCAAUGCCAU | 1014 | AUGGCAUUGAUUGUGUCCU | 1583 |
| NM_001735.2_3899-3917_s | 3899-3917 | CAAUCAAUGCCAUUGAGGG | 1015 | CCCUCAAUGGCAUUGAUUG | 1584 |
| NM_001735.2_3909-3927_s | 3909-3927 | CAUUGAGGGCCUGACGGAA | 1016 | UUCCGUCAGGCCCUCAAUG | 1585 |
| NM_001735.2_3922-3940_s | 3922-3940 | ACGGAAUAUUCACUCCUGG | 1017 | CCAGGAGUGAAUAUUCCGU | 1586 |
| NM_001735.2_3930-3948_s | 3930-3948 | UUCACUCCUGGUUAAACAA | 1018 | UUGUUUAACCAGGAGUGAA | 1587 |
| NM_001735.2_3939-3957_s | 3939-3957 | GGUUAAACAACUCCGCUUG | 1019 | CAAGCGGAGUUGUUUAACC | 1588 |
| NM_001735.2_3951-3969_s | 3951-3969 | CCGCUUGAGUAUGGACAUC | 1020 | GAUGUCCAUACUCAAGCGG | 1589 |
| NM_001735.2_3963-3981_s | 3963-3981 | GGACAUCGAUGUUUCUUAC | 1021 | GUAAGAAACAUCGAUGUCC | 1590 |
| NM_001735.2_3969-3987_s | 3969-3987 | CGAUGUUUCUUACAAGCAU | 1022 | AUGCUUGUAAGAAACAUCG | 1591 |
| NM_001735.2_3981-3999_s | 3981-3999 | CAAGCAUAAAGGUGCCUUA | 1023 | UAAGGCACCUUUAUGCUUG | 1592 |
| NM_001735.2_3992-4010_s | 3992-4010 | GUGCCUUACAUAAUUAUAA | 1024 | UUAUAAUUAUGUAAGGCAC | 1593 |
| NM_001735.2_3999-4017_s | 3999-4017 | ACAUAAUUAUAAAAUGACA | 1025 | UGUCAUUUUAUAAUUAUGU | 1594 |
| NM_001735.2_4009-4027_s | 4009-4027 | AAAAUGACAGACAAGAAUU | 1026 | AAUUCUUGUCUGUCAUUUU | 1595 |
| NM_001735.2_4020-4038_s | 4020-4038 | CAAGAAUUUCCUUGGGAGG | 1027 | CCUCCCAAGGAAAUUCUUG | 1596 |
| NM_001735.2_4029-4047_s | 4029-4047 | CCUUGGGAGGCCAGUAGAG | 1028 | CUCUACUGGCCUCCCAAGG | 1597 |
| NM_001735.2_4041-4059_s | 4041-4059 | AGUAGAGGUGCUUCUCAAU | 1029 | AUUGAGAAGCACCUCUACU | 1598 |
| NM_001735.2_4051-4069_s | 4051-4069 | CUUCUCAAUGAUGACCUCA | 1030 | UGAGGUCAUCAUUGAGAAG | 1599 |
| NM_001735.2_4062-4080_s | 4062-4080 | UGACCUCAUUGUCAGUACA | 1031 | UGUACUGACAAUGAGGUCA | 1600 |
| NM_001735.2_4072-4090_s | 4072-4090 | GUCAGUACAGGAUUUGGCA | 1032 | UGCCAAAUCCUGUACUGAC | 1601 |
| NM_001735.2_4080-4098_s | 4080-4098 | AGGAUUUGGCAGUGGCUUG | 1033 | CAAGCCACUGCCAAAUCCU | 1602 |
| NM_001735.2_4092-4110_s | 4092-4110 | UGGCUUGGCUACAGUACAU | 1034 | AUGUACUGUAGCCAAGCCA | 1603 |
| NM_001735.2_4099-4117_s | 4099-4117 | GCUACAGUACAUGUAACAA | 1035 | UUGUUACAUGUACUGUAGC | 1604 |
| NM_001735.2_4113-4131_s | 4113-4131 | AACAACUGUAGUUCACAAA | 1036 | UUUGUGAACUACAGUUGUU | 1605 |
| NM_001735.2_4120-4138_s | 4120-4138 | GUAGUUCACAAAACCAGUA | 1037 | UACUGGUUUUGUGAACUAC | 1606 |
| NM_001735.2_4130-4148_s | 4130-4148 | AAACCAGUACCUCUGAGGA | 1038 | UCCUCAGAGGUACUGGUUU | 1607 |
| NM_001735.2_4143-4161_s | 4143-4161 | UGAGGAAGUUUGCAGCUUU | 1039 | AAAGCUGCAAACUUCCUCA | 1608 |
| NM_001735.2_4153-4171_s | 4153-4171 | UGCAGCUUUUAUUUGAAAA | 1040 | UUUUCAAAUAAAAGCUGCA | 1609 |
| NM_001735.2_4163-4181_s | 4163-4181 | AUUUGAAAAUCGAUACUCA | 1041 | UGAGUAUCGAUUUUCAAAU | 1610 |
| NM_001735.2_4173-4191_s | 4173-4191 | CGAUACUCAGGAUAUUGAA | 1042 | UUCAAUAUCCUGAGUAUCG | 1611 |
| NM_001735.2_4182-4200_s | 4182-4200 | GGAUAUUGAAGCAUCCCAC | 1043 | GUGGGAUGCUUCAAUAUCC | 1612 |
| NM_001735.2_4189-4207_s | 4189-4207 | GAAGCAUCCCACUACAGAG | 1044 | CUCUGUAGUGGGAUGCUUC | 1613 |
| NM_001735.2_4199-4217_s | 4199-4217 | ACUACAGAGGCUACGGAAA | 1045 | UUUCCGUAGCCUCUGUAGU | 1614 |
| NM_001735.2_4212-4230_s | 4212-4230 | CGGAAACUCUGAUUACAAA | 1046 | UUUGUAAUCAGAGUUUCCG | 1615 |
| NM_001735.2_4221-4239_s | 4221-4239 | UGAUUACAAACGCAUAGUA | 1047 | UACUAUGCGUUUGUAAUCA | 1616 |
| NM_001735.2_4232-4250_s | 4232-4250 | GCAUAGUAGCAUGUGCCAG | 1048 | CUGGCACAUGCUACUAUGC | 1617 |
| NM_001735.2_4240-4258_s | 4240-4258 | GCAUGUGCCAGCUACAAGC | 1049 | GCUUGUAGCUGGCACAUGC | 1618 |
| NM_001735.2_4251-4269_s | 4251-4269 | CUACAAGCCCAGCAGGGAA | 1050 | UUCCCUGCUGGGCUUGUAG | 1619 |
| NM_001735.2_4260-4278_s | 4260-4278 | CAGCAGGGAAGAAUCAUCA | 1051 | UGAUGAUUCUUCCCUGCUG | 1620 |
| NM_001735.2_4270-4288_s | 4270-4288 | GAAUCAUCAUCUGGAUCCU | 1052 | AGGAUCCAGAUGAUGAUUC | 1621 |
| NM_001735.2_4283-4301_s | 4283-4301 | GAUCCUCUCAUGCGGUGAU | 1053 | AUCACCGCAUGAGAGGAUC | 1622 |
| NM_001735.2_4289-4307_s | 4289-4307 | CUCAUGCGGUGAUGGACAU | 1054 | AUGUCCAUCACCGCAUGAG | 1623 |
| NM_001735.2_4299-4317_s | 4299-4317 | GAUGGACAUCUCCUUGCCU | 1055 | AGGCAAGGAGAUGUCCAUC | 1624 |
| NM_001735.2_4311-4329_s | 4311-4329 | CUUGCCUACUGGAAUCAGU | 1056 | ACUGAUUCCAGUAGGCAAG | 1625 |
| NM_001735.2_4322-4340_s | 4322-4340 | GAAUCAGUGCAAAUGAAGA | 1057 | UCUUCAUUUGCACUGAUUC | 1626 |
| NM_001735.2_4332-4350_s | 4332-4350 | AAAUGAAGAAGACUUAAAA | 1058 | UUUUAAGUCUUCUUCAUUU | 1627 |
| NM_001735.2_4339-4357_s | 4339-4357 | GAAGACUUAAAAGCCCUUG | 1059 | CAAGGGCUUUUAAGUCUUC | 1628 |
| NM_001735.2_4353-4371_s | 4353-4371 | CCUUGUGGAAGGGGUGGAU | 1060 | AUCCACCCCUUCCACAAGG | 1629 |
| NM_001735.2_4360-4378_s | 4360-4378 | GAAGGGGUGGAUCAACUAU | 1061 | AUAGUUGAUCCACCCCUUC | 1630 |
| NM_001735.2_4370-4388_s | 4370-4388 | AUCAACUAUUCACUGAUUA | 1062 | UAAUCAGUGAAUAGUUGAU | 1631 |
| NM_001735.2_4380-4398_s | 4380-4398 | CACUGAUUACCAAAUCAAA | 1063 | UUUGAUUUGGUAAUCAGUG | 1632 |
| NM_001735.2_4393-4411_s | 4393-4411 | AUCAAAGAUGGACAUGUUA | 1064 | UAACAUGUCCAUCUUUGAU | 1633 |
| NM_001735.2_4402-4420_s | 4402-4420 | GGACAUGUUAUUCUGCAAC | 1065 | GUUGCAGAAUAACAUGUCC | 1634 |
| NM_001735.2_4413-4431_s | 4413-4431 | UCUGCAACUGAAUUCGAUU | 1066 | AAUCGAAUUCAGUUGCAGA | 1635 |
| NM_001735.2_4422-4440_s | 4422-4440 | GAAUUCGAUUCCCUCCAGU | 1067 | ACUGGAGGGAAUCGAAUUC | 1636 |
| NM_001735.2_4432-4450_s | 4432-4450 | CCCUCCAGUGAUUUCCUUU | 1068 | AAAGGAAAUCACUGGAGGG | 1637 |
| NM_001735.2_4441-4459_s | 4441-4459 | GAUUUCCUUUGUGUACGAU | 1069 | AUCGUACACAAAGGAAAUC | 1638 |
| NM_001735.2_4453-4471_s | 4453-4471 | GUACGAUUCCGGAUAUUUG | 1070 | CAAAUAUCCGGAAUCGUAC | 1639 |
| NM_001735.2_4462-4480_s | 4462-4480 | CGGAUAUUUGAACUCUUUG | 1071 | CAAAGAGUUCAAAUAUCCG | 1640 |
| NM_001735.2_4473-4491_s | 4473-4491 | ACUCUUUGAAGUUGGGUUU | 1072 | AAACCCAACUUCAAAGAGU | 1641 |
| NM_001735.2_4482-4500_s | 4482-4500 | AGUUGGGUUUCUCAGUCCU | 1073 | AGGACUGAGAAACCCAACU | 1642 |
| NM_001735.2_4490-4508_s | 4490-4508 | UUCUCAGUCCUGCCACUUU | 1074 | AAAGUGGCAGGACUGAGAA | 1643 |
| NM_001735.2_4503-4521_s | 4503-4521 | CACUUUCACAGUGUACGAA | 1075 | UUCGUACACUGUGAAAGUG | 1644 |
| NM_001735.2_4509-4527_s | 4509-4527 | CACAGUGUACGAAUACCAC | 1076 | GUGGUAUUCGUACACUGUG | 1645 |
| NM_001735.2_4523-4541_s | 4523-4541 | ACCACAGACCAGAUAAACA | 1077 | UGUUUAUCUGGUCUGUGGU | 1646 |
| NM_001735.2_4531-4549_s | 4531-4549 | CCAGAUAAACAGUGUACCA | 1078 | UGGUACACUGUUUAUCUGG | 1647 |
| NM_001735.2_4540-4558_s | 4540-4558 | CAGUGUACCAUGUUUUAUA | 1079 | UAUAAAACAUGGUACACUG | 1648 |
| NM_001735.2_4551-4569_s | 4551-4569 | GUUUUAUAGCACUUCCAAU | 1080 | AUUGGAAGUGCUAUAAAAC | 1649 |
| NM_001735.2_4562-4580_s | 4562-4580 | CUUCCAAUAUCAAAAUUCA | 1081 | UGAAUUUUGAUAUUGGAAG | 1650 |
| NM_001735.2_4570-4588_s | 4570-4588 | AUCAAAAUUCAGAAAGUCU | 1082 | AGACUUUCUGAAUUUUGAU | 1651 |
| NM_001735.2_4581-4599_s | 4581-4599 | GAAAGUCUGUGAAGGAGCC | 1083 | GGCUCCUUCACAGACUUUC | 1652 |
| NM_001735.2_4591-4609_s | 4591-4609 | GAAGGAGCCGCGUGCAAGU | 1084 | ACUUGCACGCGGCUCCUUC | 1653 |
| NM_001735.2_4601-4619_s | 4601-4619 | CGUGCAAGUGUGUAGAAGC | 1085 | GCUUCUACACACUUGCACG | 1654 |
| NM_001735.2_4612-4630_s | 4612-4630 | GUAGAAGCUGAUUGUGGGC | 1086 | GCCCACAAUCAGCUUCUAC | 1655 |
| NM_001735.2_4619-4637_s | 4619-4637 | CUGAUUGUGGGCAAAUGCA | 1087 | UGCAUUUGCCCACAAUCAG | 1656 |
| NM_001735.2_4629-4647_s | 4629-4647 | GCAAAUGCAGGAAGAAUUG | 1088 | CAAUUCUUCCUGCAUUUGC | 1657 |
| NM_001735.2_4639-4657_s | 4639-4657 | GAAGAAUUGGAUCUGACAA | 1089 | UUGUCAGAUCCAAUUCUUC | 1658 |
| NM_001735.2_4651-4669_s | 4651-4669 | CUGACAAUCUCUGCAGAGA | 1090 | UCUCUGCAGAGAUUGUCAG | 1659 |
| NM_001735.2_4663-4681_s | 4663-4681 | GCAGAGACAAGAAAACAAA | 1091 | UUUGUUUUCUUGUCUCUGC | 1660 |
| NM_001735.2_4670-4688_s | 4670-4688 | CAAGAAAACAAACAGCAUG | 1092 | CAUGCUGUUUGUUUUCUUG | 1661 |
| NM_001735.2_4681-4699_s | 4681-4699 | ACAGCAUGUAAACCAGAGA | 1093 | UCUCUGGUUUACAUGCUGU | 1662 |
| NM_001735.2_4693-4711_s | 4693-4711 | CCAGAGAUUGCAUAUGCUU | 1094 | AAGCAUAUGCAAUCUCUGG | 1663 |
| NM_001735.2_4702-4720_s | 4702-4720 | GCAUAUGCUUAUAAAGUUA | 1095 | UAACUUUAUAAGCAUAUGC | 1664 |
| NM_001735.2_4710-4728_s | 4710-4728 | UUAUAAAGUUAGCAUCACA | 1096 | UGUGAUGCUAACUUUAUAA | 1665 |
| NM_001735.2_4722-4740_s | 4722-4740 | CAUCACAUCCAUCACUGUA | 1097 | UACAGUGAUGGAUGUGAUG | 1666 |
| NM_001735.2_4733-4751_s | 4733-4751 | UCACUGUAGAAAAUGUUUU | 1098 | AAAACAUUUUCUACAGUGA | 1667 |
| NM_001735.2_4740-4758_s | 4740-4758 | AGAAAAUGUUUUUGUCAAG | 1099 | CUUGACAAAAACAUUUUCU | 1668 |
| NM_001735.2_4750-4768_s | 4750-4768 | UUUGUCAAGUACAAGGCAA | 1100 | UUGCCUUGUACUUGACAAA | 1669 |
| NM_001735.2_4763-4781_s | 4763-4781 | AGGCAACCCUUCUGGAUAU | 1101 | AUAUCCAGAAGGGUUGCCU | 1670 |
| NM_001735.2_4770-4788_s | 4770-4788 | CCUUCUGGAUAUCUACAAA | 1102 | UUUGUAGAUAUCCAGAAGG | 1671 |
| NM_001735.2_4779-4797_s | 4779-4797 | UAUCUACAAAACUGGGGAA | 1103 | UUCCCCAGUUUUGUAGAUA | 1672 |
| NM_001735.2_4790-4808_s | 4790-4808 | CUGGGGAAGCUGUUGCUGA | 1104 | UCAGCAACAGCUUCCCCAG | 1673 |
| NM_001735.2_4799-4817_s | 4799-4817 | CUGUUGCUGAGAAAGACUC | 1105 | GAGUCUUUCUCAGCAACAG | 1674 |
| NM_001735.2_4813-4831_s | 4813-4831 | GACUCUGAGAUUACCUUCA | 1106 | UGAAGGUAAUCUCAGAGUC | 1675 |
| NM_001735.2_4819-4837_s | 4819-4837 | GAGAUUACCUUCAUUAAAA | 1107 | UUUUAAUGAAGGUAAUCUC | 1676 |
| NM_001735.2_4831-4849_s | 4831-4849 | AUUAAAAAGGUAACCUGUA | 1108 | UACAGGUUACCUUUUUAAU | 1677 |
| NM_001735.2_4841-4859_s | 4841-4859 | UAACCUGUACUAACGCUGA | 1109 | UCAGCGUUAGUACAGGUUA | 1678 |
| NM_001735.2_4850-4868_s | 4850-4868 | CUAACGCUGAGCUGGUAAA | 1110 | UUUACCAGCUCAGCGUUAG | 1679 |
| NM_001735.2_4863-4881_s | 4863-4881 | GGUAAAAGGAAGACAGUAC | 1111 | GUACUGUCUUCCUUUUACC | 1680 |
| NM_001735.2_4871-4889_s | 4871-4889 | GAAGACAGUACUUAAUUAU | 1112 | AUAAUUAAGUACUGUCUUC | 1681 |
| NM_001735.2_4881-4899_s | 4881-4899 | CUUAAUUAUGGGUAAAGAA | 1113 | UUCUUUACCCAUAAUUAAG | 1682 |
| NM_001735.2_4893-4911_s | 4893-4911 | UAAAGAAGCCCUCCAGAUA | 1114 | UAUCUGGAGGGCUUCUUUA | 1683 |
| NM_001735.2_4902-4920_s | 4902-4920 | CCUCCAGAUAAAAUACAAU | 1115 | AUUGUAUUUUAUCUGGAGG | 1684 |
| NM_001735.2_4912-4930_s | 4912-4930 | AAAUACAAUUUCAGUUUCA | 1116 | UGAAACUGAAAUUGUAUUU | 1685 |
| NM_001735.2_4923-4941_s | 4923-4941 | CAGUUUCAGGUACAUCUAC | 1117 | GUAGAUGUACCUGAAACUG | 1686 |
| NM_001735.2_4931-4949_s | 4931-4949 | GGUACAUCUACCCUUUAGA | 1118 | UCUAAAGGGUAGAUGUACC | 1687 |
| NM_001735.2_4942-4960_s | 4942-4960 | CCUUUAGAUUCCUUGACCU | 1119 | AGGUCAAGGAAUCUAAAGG | 1688 |
| NM_001735.2_4952-4970_s | 4952-4970 | CCUUGACCUGGAUUGAAUA | 1120 | UAUUCAAUCCAGGUCAAGG | 1689 |
| NM_001735.2_4961-4979_s | 4961-4979 | GGAUUGAAUACUGGCCUAG | 1121 | CUAGGCCAGUAUUCAAUCC | 1690 |
| NM_001735.2_4971-4989_s | 4971-4989 | CUGGCCUAGAGACACAACA | 1122 | UGUUGUGUCUCUAGGCCAG | 1691 |
| NM_001735.2_4979-4997_s | 4979-4997 | GAGACACAACAUGUUCAUC | 1123 | GAUGAACAUGUUGUGUCUC | 1692 |
| NM_001735.2_4991-5009_s | 4991-5009 | GUUCAUCGUGUCAAGCAUU | 1124 | AAUGCUUGACACGAUGAAC | 1693 |
| NM_001735.2_5000-5018_s | 5000-5018 | GUCAAGCAUUUUUAGCUAA | 1125 | UUAGCUAAAAAUGCUUGAC | 1694 |
| NM_001735.2_5013-5031_s | 5013-5031 | AGCUAAUUUAGAUGAAUUU | 1126 | AAAUUCAUCUAAAUUAGCU | 1695 |
| NM_001735.2_5022-5040_s | 5022-5040 | AGAUGAAUUUGCCGAAGAU | 1127 | AUCUUCGGCAAAUUCAUCU | 1696 |
| NM_001735.2_5033-5051_s | 5033-5051 | CCGAAGAUAUCUUUUUAAA | 1128 | UUUAAAAAGAUAUCUUCGG | 1697 |
| NM_001735.2_5043-5061_s | 5043-5061 | CUUUUUAAAUGGAUGCUAA | 1129 | UUAGCAUCCAUUUAAAAAG | 1698 |
| NM_001735.2_5053-5071_s | 5053-5071 | GGAUGCUAAAAUUCCUGAA | 1130 | UUCAGGAAUUUUAGCAUCC | 1699 |
| NM_001735.2_5059-5077_s | 5059-5077 | UAAAAUUCCUGAAGUUCAG | 1131 | CUGAACUUCAGGAAUUUUA | 1700 |
| NM_001735.2_5071-5089_s | 5071-5089 | AGUUCAGCUGCAUACAGUU | 1132 | AACUGUAUGCAGCUGAACU | 1701 |
| NM_001735.2_5080-5098_s | 5080-5098 | GCAUACAGUUUGCACUUAU | 1133 | AUAAGUGCAAACUGUAUGC | 1702 |
| NM_001735.2_5093-5111_s | 5093-5111 | ACUUAUGGACUCCUGUUGU | 1134 | ACAACAGGAGUCCAUAAGU | 1703 |
| NM_001735.2_5099-5117_s | 5099-5117 | GGACUCCUGUUGUUGAAGU | 1135 | ACUUCAACAACAGGAGUCC | 1704 |
| NM_001735.2_5109-5127_s | 5109-5127 | UGUUGAAGUUCGUUUUUUU | 1136 | AAAAAAACGAACUUCAACA | 1705 |
| NM_001735.2_5122-5140_s | 5122-5140 | UUUUUUGUUUUCUUCUUUU | 1137 | AAAAGAAGAAAACAAAAAA | 1706 |
| NM_001735.2_5132-5150_s | 5132-5150 | UCUUCUUUUUUUAAACAUU | 1138 | AAUGUUUAAAAAAAGAAGA | 1707 |
| NM_001735.2_5139-5157_s | 5139-5157 | UUUUUAAACAUUCAUAGCU | 1139 | AGCUAUGAAUGUUUAAAAA | 1708 |
| NM_001735.2_5152-5170_s | 5152-5170 | AUAGCUGGUCUUAUUUGUA | 1140 | UACAAAUAAGACCAGCUAU | 1709 |
| NM_001735.2_5159-5177_s | 5159-5177 | GUCUUAUUUGUAAAGCUCA | 1141 | UGAGCUUUACAAAUAAGAC | 1710 |
| NM_001735.2_5170-5188_s | 5170-5188 | AAAGCUCACUUUACUUAGA | 1142 | UCUAAGUAAAGUGAGCUUU | 1711 |
| NM_001735.2_5182-5200_s | 5182-5200 | ACUUAGAAUUAGUGGCACU | 1143 | AGUGCCACUAAUUCUAAGU | 1712 |
| NM_001735.2_5192-5210_s | 5192-5210 | AGUGGCACUUGCUUUUAUU | 1144 | AAUAAAAGCAAGUGCCACU | 1713 |
| NM_001735.2_5202-5220_s | 5202-5220 | GCUUUUAUUAGAGAAUGAU | 1145 | AUCAUUCUCUAAUAAAAGC | 1714 |
| NM_001735.2_5212-5230_s | 5212-5230 | GAGAAUGAUUUCAAAUGCU | 1146 | AGCAUUUGAAAUCAUUCUC | 1715 |
| NM_001735.2_5220-5238_s | 5220-5238 | UUUCAAAUGCUGUAACUUU | 1147 | AAAGUUACAGCAUUUGAAA | 1716 |
| NM_001735.2_5231-5249_s | 5231-5249 | GUAACUUUCUGAAAUAACA | 1148 | UGUUAUUUCAGAAAGUUAC | 1717 |
| NM_001735.2_5241-5259_s | 5241-5259 | GAAAUAACAUGGCCUUGGA | 1149 | UCCAAGGCCAUGUUAUUUC | 1718 |
| NM_001735.2_5253-5271_s | 5253-5271 | CCUUGGAGGGCAUGAAGAC | 1150 | GUCUUCAUGCCCUCCAAGG | 1719 |
| NM_001735.2_5259-5277_s | 5259-5277 | AGGGCAUGAAGACAGAUAC | 1151 | GUAUCUGUCUUCAUGCCCU | 1720 |
| NM_001735.2_5273-5291_s | 5273-5291 | GAUACUCCUCCAAGGUUAU | 1152 | AUAACCUUGGAGGAGUAUC | 1721 |
| NM_001735.2_5279-5297_s | 5279-5297 | CCUCCAAGGUUAUUGGACA | 1153 | UGUCCAAUAACCUUGGAGG | 1722 |
| NM_001735.2_5293-5311_s | 5293-5311 | GGACACCGGAAACAAUAAA | 1154 | UUUAUUGUUUCCGGUGUCC | 1723 |
| NM_001735.2_5301-5319_s | 5301-5319 | GAAACAAUAAAUUGGAACA | 1155 | UGUUCCAAUUUAUUGUUUC | 1724 |
| NM_001735.2_5311-5329_s | 5311-5329 | AUUGGAACACCUCCUCAAA | 1156 | UUUGAGGAGGUGUUCCAAU | 1725 |
| NM_001735.2_5322-5340_s | 5322-5340 | UCCUCAAACCUACCACUCA | 1157 | UGAGUGGUAGGUUUGAGGA | 1726 |
| NM_001735.2_5331-5349_s | 5331-5349 | CUACCACUCAGGAAUGUUU | 1158 | AAACAUUCCUGAGUGGUAG | 1727 |
| NM_001735.2_5343-5361_s | 5343-5361 | AAUGUUUGCUGGGGCCGAA | 1159 | UUCGGCCCCAGCAAACAUU | 1728 |
| NM_001735.2_5349-5367_s | 5349-5367 | UGCUGGGGCCGAAAGAACA | 1160 | UGUUCUUUCGGCCCCAGCA | 1729 |
| NM_001735.2_5360-5378_s | 5360-5378 | AAAGAACAGUCCAUUGAAA | 1161 | UUUCAAUGGACUGUUCUUU | 1730 |
| NM_001735.2_5371-5389_s | 5371-5389 | CAUUGAAAGGGAGUAUUAC | 1162 | GUAAUACUCCCUUUCAAUG | 1731 |
| NM_001735.2_5380-5398_s | 5380-5398 | GGAGUAUUACAAAAACAUG | 1163 | CAUGUUUUUGUAAUACUCC | 1732 |
| NM_001735.2_5391-5409_s | 5391-5409 | AAAACAUGGCCUUUGCUUG | 1164 | CAAGCAAAGGCCAUGUUUU | 1733 |
| NM_001735.2_5399-5417_s | 5399-5417 | GCCUUUGCUUGAAAGAAAA | 1165 | UUUUCUUUCAAGCAAAGGC | 1734 |
| NM_001735.2_5409-5427_s | 5409-5427 | GAAAGAAAAUACCAAGGAA | 1166 | UUCCUUGGUAUUUUCUUUC | 1735 |
| NM_001735.2_5420-5438_s | 5420-5438 | CCAAGGAACAGGAAACUGA | 1167 | UCAGUUUCCUGUUCCUUGG | 1736 |
| NM_001735.2_5433-5451_s | 5433-5451 | AACUGAUCAUUAAAGCCUG | 1168 | CAGGCUUUAAUGAUCAGUU | 1737 |
| NM_001735.2_5441-5459_s | 5441-5459 | AUUAAAGCCUGAGUUUGCU | 1169 | AGCAAACUCAGGCUUUAAU | 1738 |

### Example 5: In Vivo C5 Silencing

[0895] Groups of three female cynomolgus macaques were treated with C5-siRNA AD-58641 subcutaneously in the scapular and mid-dorsal areas of the back at 2.5 mg/kg or 5 mg/kg doses or a vehicle control. Two rounds of dosing were administered with eight doses in each round given every third day. Serum C5 was collected and evaluated using an ELISA assay specific for C5 detection (Abcam) at the indicated time points (FIG. 13). C5 levels were normalized to the average of three pre-dose samples. Samples collected prior to dosing, and on day 23 (24 hours after the last dose administered in the first round of treatment) were analyzed by complete serum chemistry, hematology and coagulation panels.

[0896] Analysis of serum C5 protein levels relative to pre-treatment serum C5 protein levels demonstrated that the 5 mg/kg AD-58641 dosing regimen reduced serum C5 protein levels up to 98% (FIG. 12). The average serum C5 levels were reduced by 97% at the nadir, indicating that the majority of circulating C5 is hepatic in origin. There was potent, dose-dependent and durable knock-down of serum C5 protein levels with subcutaneous administration of AD-58641. No changes in hematology, serum chemistry or coagulation parameters were identified 24 hours after the first round of dosing.

[0897] Serum hemolytic activity was also analyzed using a sensitized sheep erythrocyte assay to measure classical pathway activity. The percent hemolysis was calculated relative to maximal hemolysis and to background hemolysis in control samples. Mean hemolysis values+/−the SEM for three animals were calculated and analyzed (FIG. 13). Hemolysis was reduced up to 94% in the 5 mg/kg dosing regimen with an average inhibition of 92% at the nadir. The reduction in hemolysis was maintained for greater than two weeks following the last dose.

### Example 6: In Vitro Screening of Additional siRNAs

[0898] The C5 sense and antisense strand sequences shown in Table 20 were modified at the 3′-terminus with a short sequence of deoxy-thymine nucleotides (dT) (Table 21). The in vitro efficacy of duplexes comprising the sense and antisense sequences listed in Table 21 was determined using the following methods.

### Cell Culture and Transfections

[0899] Hep3B cells (ATCC, Manassas, Va.) were grown to near confluence at 37° C. in an atmosphere of 5% CO₂ in EMEM (ATCC) supplemented with 10% FBS, before being released from the plate by trypsinization. Transfection was carried out by adding 5 μl of Opti-MEM plus 0.1 μl of Lipofectamine RNAiMax per well (Invitrogen, Carlsbad Calif. cat #13778-150) to 5 μl of siRNA duplexes per well into a 384-well plate and incubated at room temperature for 15 minutes. 40 μl of complete growth media containing ˜5×10³ Hep3B cells were then added to the siRNA mixture. Cells were incubated for 24 hours prior to RNA purification. Experiments were performed at 10 nM final duplex concentration.

Total RNA Isolation Using DYNABEADS mRNA Isolation Kit (Invitrogen, Part #: 610-12)

[0900] RNA isolation was performed using a semi-automated process of a Biotek EL 405 washer. Briefly, cells were lysed in 75 μl of Lysis/Binding Buffer containing 2 ul of Dynabeads, then mixed for 10 minutes on setting 7 of an electromagnetic shaker (Union Scientific). Magnetic beads were captured using magnetic stand and the supernatant was removed. After removing supernatant, magnetic beads were washed with 90 μl Wash Buffer A, followed by 90 μl of Wash buffer B. Beads were then washed twice with 100 μl of Elution buffer which was then aspirated and cDNA generated directly on bead bound RNA in the 384 well plate.

cDNA Synthesis Using ABI High Capacity cDNA Reverse Transcription Kit (Applied Biosystems, Foster City, Calif., Cat #4368813)

[0901] A master mix of 2 μl 10× Buffer, 0.8 μl 25×dNTPs, 2 μl Random primers, 1 μl Reverse Transcriptase, 1 μl RNase inhibitor and 3.2 μl of H₂O per reaction were added directly to the bead bound RNA in the 384 well plates used for RNA isolation. Plates were then shaken on an electromagnetic shaker for 10 minutes and then placed in a 37° C. incubator for 2 hours. Following this incubation, plates were place on a shake in an 80° C. incubator for 7 minutes to inactivate the enzyme and elute the RNA/cDNA from the beads.

### Real Time PCR

[0902] 2 μl of cDNA were added to a master mix containing 0.5 μl GAPDH TaqMan Probe (Applied Biosystems Cat #4326317E), 0.5 μl C5 TaqMan probe (Applied Biosystems cat # Hs00156197_M1) and 5 μl Lightcycler 480 probe master mix (Roche Cat #04887301001) per well in a 384 well plates (Roche cat #04887301001). Real time PCR was done in a Roche LC480 Real Time PCR system (Roche). Each duplex was tested in at least two independent transfections and each transfection was assayed in duplicate.

[0903] To calculate relative fold change, real time data were analyzed using the ΔΔCt method and normalized to assays performed with cells transfected with 10 nM AD-1955, or mock transfected cells.

[0904] Table 22 shows the results of a single dose screen in Hep3B cells transfected with the indicated dT modified iRNAs. Data are expressed as percent of message remaining relative to untreated cells.

TABLE 21
dT Modified C5 iRNAs

| | | SEQ ID | Position in | | SEQ ID |
|---|---|---|---|---|---|
| Duplex ID | Sense Sequence | NO: | NM_001735.2 | Antisense Sequence | NO: |
| AD-61779.2 | UAUCCGUGGUUUCCUGCUAdTdT | 1739 | 3-21 | UAGCAGGAAACCACGGAUAdTdT | 2306 |
| AD-61785.2 | GGUUUCCUGCUACCUCCAAdTdT | 1740 | 10-28 | UUGGAGGUAGCAGGAAACCdTdT | 2307 |
| AD-61791.2 | CCUCCAACCAUGGGCCUUUdTdT | 1741 | 22-40 | AAAGGCCCAUGGUUGGAGGdTdT | 2308 |
| AD-61797.2 | GGGCCUUUUGGGAAUACUUdTdT | 1742 | 33-51 | AAGUAUUCCCAAAAGGCCCdTdT | 2309 |
| AD-61803.2 | GGAAUACUUUGUUUUUUAAdTdT | 1743 | 43-61 | UUAAAAAACAAAGUAUUCCdTdT | 2310 |
| AD-61809.2 | CUUUGUUUUUUAAUCUUCCdTdT | 1744 | 49-67 | GGAAGAUUAAAAAACAAAGdTdT | 2311 |
| AD-61815.2 | CUUCCUGGGGAAAACCUGGdTdT | 1745 | 63-81 | CCAGGUUUUCCCCAGGAAGdTdT | 2312 |
| AD-61821.2 | GGAAAACCUGGGGACAGGAdTdT | 1746 | 71-89 | UCCUGUCCCCAGGUUUUCCdTdT | 2313 |
| AD-61780.2 | GGGACAGGAGCAAACAUAUdTdT | 1747 | 81-99 | AUAUGUUUGCUCCUGUCCCdTdT | 2314 |
| AD-61786.2 | CAAACAUAUGUCAUUUCAGdTdT | 1748 | 91-109 | CUGAAAUGACAUAUGUUUGdTdT | 2315 |
| AD-61792.2 | CAUUUCAGCACCAAAAAUAdTdT | 1749 | 102-120 | UAUUUUUGGUGCUGAAAUGdTdT | 2316 |
| AD-61798.2 | GCACCAAAAAUAUUCCGUGdTdT | 1750 | 109-127 | CACGGAAUAUUUUUGGUGCdTdT | 2317 |
| AD-61804.2 | CCGUGUUGGAGCAUCUGAAdTdT | 1751 | 123-141 | UUCAGAUGCUCCAACACGGdTdT | 2318 |
| AD-61810.2 | GGAGCAUCUGAAAAUAUUGdTdT | 1752 | 130-148 | CAAUAUUUUCAGAUGCUCCdTdT | 2319 |
| AD-61816.2 | GAAAAUAUUGUGAUUCAAGdTdT | 1753 | 139-157 | CUUGAAUCACAAUAUUUUCdTdT | 2320 |
| AD-61822.2 | GAUUCAAGUUUAUGGAUACdTdT | 1754 | 150-168 | GUAUCCAUAAACUUGAAUCdTdT | 2321 |
| AD-61781.2 | GGAUACACUGAAGCAUUUGdTdT | 1755 | 163-181 | CAAAUGCUUCAGUGUAUCCdTdT | 2322 |
| AD-61787.2 | GAAGCAUUUGAUGCAACAAdTdT | 1756 | 172-190 | UUGUUGCAUCAAAUGCUUCdTdT | 2323 |
| AD-61793.2 | UGCAACAAUCUCUAUUAAAdTdT | 1757 | 183-201 | UUUAAUAGAGAUUGUUGCAdTdT | 2324 |
| AD-61799.2 | AAUCUCUAUUAAAAGUUAUdTdT | 1758 | 189-207 | AUAACUUUUAAUAGAGAUUdTdT | 2325 |
| AD-61805.2 | AAGUUAUCCUGAUAAAAAAdTdT | 1759 | 201-219 | UUUUUUAUCAGGAUAACUUdTdT | 2326 |
| AD-61811.2 | CUGAUAAAAAAUUUAGUUAdTdT | 1760 | 209-227 | UAACUAAAUUUUUUAUCAGdTdT | 2327 |
| AD-61817.2 | UUAGUUACUCCUCAGGCCAdTdT | 1761 | 221-239 | UGGCCUGAGGAGUAACUAAdTdT | 2328 |
| AD-61823.2 | CCUCAGGCCAUGUUCAUUUdTdT | 1762 | 230-248 | AAAUGAACAUGGCCUGAGGdTdT | 2329 |
| AD-61782.2 | UUCAUUUAUCCUCAGAGAAdTdT | 1763 | 242-260 | UUCUCUGAGGAUAAAUGAAdTdT | 2330 |
| AD-61788.2 | CUCAGAGAAUAAAUUCCAAdTdT | 1764 | 252-270 | UUGGAAUUUAUUCUCUGAGdTdT | 2331 |
| AD-61794.2 | AAUAAAUUCCAAAACUCUGdTdT | 1765 | 259-277 | CAGAGUUUUGGAAUUUAUUdTdT | 2332 |
| AD-61800.2 | CUCUGCAAUCUUAACAAUAdTdT | 1766 | 273-291 | UAUUGUUAAGAUUGCAGAGdTdT | 2333 |
| AD-61806.2 | CUUAACAAUACAACCAAAAdTdT | 1767 | 282-300 | UUUUGGUUGUAUUGUUAAGdTdT | 2334 |
| AD-61812.2 | CAACCAAAACAAUUGCCUGdTdT | 1768 | 292-310 | CAGGCAAUUGUUUUGGUUGdTdT | 2335 |
| AD-61818.2 | CAAUUGCCUGGAGGACAAAdTdT | 1769 | 301-319 | UUUGUCCUCCAGGCAAUUGdTdT | 2336 |
| AD-61824.2 | GGACAAAACCCAGUUUCUUdTdT | 1770 | 313-331 | AAGAAACUGGGUUUUGUCCdTdT | 2337 |
| AD-61783.2 | CCAGUUUCUUAUGUGUAUUdTdT | 1771 | 322-340 | AAUACACAUAAGAAACUGGdTdT | 2338 |
| AD-61789.2 | AUGUGUAUUUGGAAGUUGUdTdT | 1772 | 332-350 | ACAACUUCCAAAUACACAUdTdT | 2339 |
| AD-61795.2 | GGAAGUUGUAUCAAAGCAUdTdT | 1773 | 342-360 | AUGCUUUGAUACAACUUCCdTdT | 2340 |
| AD-61801.2 | GUAUCAAAGCAUUUUUCAAdTdT | 1774 | 349-367 | UUGAAAAAUGCUUUGAUACdTdT | 2341 |
| AD-61807.2 | UUUUCAAAAUCAAAAAGAAdTdT | 1775 | 361-379 | UUCUUUUUGAUUUUGAAAAdTdT | 2342 |
| AD-61813.2 | CAAAAAGAAUGCCAAUAACdTdT | 1776 | 371-389 | GUUAUUGGCAUUCUUUUUGdTdT | 2343 |
| AD-61819.2 | GCCAAUAACCUAUGACAAUdTdT | 1777 | 381-399 | AUUGUCAUAGGUUAUUGGCdTdT | 2344 |
| AD-61825.2 | CCUAUGACAAUGGAUUUCUdTdT | 1778 | 389-407 | AGAAAUCCAUUGUCAUAGGdTdT | 2345 |
| AD-61784.2 | UGGAUUUCUCUUCAUUCAUdTdT | 1779 | 399-417 | AUGAAUGAAGAGAAAUCCAdTdT | 2346 |
| AD-61790.2 | CAUUCAUACAGACAAACCUdTdT | 1780 | 411-429 | AGGUUUGUCUGUAUGAAUGdTdT | 2347 |
| AD-61796.2 | CAGACAAACCUGUUUAUACdTdT | 1781 | 419-437 | GUAUAAACAGGUUUGUCUGdTdT | 2348 |
| AD-61802.2 | GUUUAUACUCCAGACCAGUdTdT | 1782 | 430-448 | ACUGGUCUGGAGUAUAAACdTdT | 2349 |
| AD-61808.2 | AGACCAGUCAGUAAAAGUUdTdT | 1783 | 441-459 | AACUUUUACUGACUGGUCUdTdT | 2350 |
| AD-61814.2 | AGUAAAAGUUAGAGUUUAUdTdT | 1784 | 450-468 | AUAAACUCUAACUUUUACUdTdT | 2351 |
| AD-61820.2 | AGAGUUUAUUCGUUGAAUGdTdT | 1785 | 460-478 | CAUUCAACGAAUAAACUCUdTdT | 2352 |
| AD-61826.2 | CGUUGAAUGACGACUUGAAdTdT | 1786 | 470-488 | UUCAAGUCGUCAUUCAACGdTdT | 2353 |
| AD-61832.2 | CUUGAAGCCAGCCAAAAGAdTdT | 1787 | 483-501 | UCUUUUGGCUGGCUUCAAGdTdT | 2354 |
| AD-61838.2 | CCAGCCAAAAGAGAAACUGdTdT | 1788 | 490-508 | CAGUUUCUCUUUUGGCUGGdTdT | 2355 |
| AD-61844.2 | AAACUGUCUUAACUUUCAUdTdT | 1789 | 503-521 | AUGAAAGUUAAGACAGUUUdTdT | 2356 |
| AD-61850.2 | AACUUUCAUAGAUCCUGAAdTdT | 1790 | 513-531 | UUCAGGAUCUAUGAAAGUUdTdT | 2357 |
| AD-61856.2 | CAUAGAUCCUGAAGGAUCAdTdT | 1791 | 519-537 | UGAUCCUUCAGGAUCUAUGdTdT | 2358 |
| AD-61862.2 | GAAGGAUCAGAAGUUGACAdTdT | 1792 | 529-547 | UGUCAACUUCUGAUCCUUCdTdT | 2359 |
| AD-61868.2 | UGACAUGGUAGAAGAAAUUdTdT | 1793 | 543-561 | AAUUUCUUCUACCAUGUCAdTdT | 2360 |
| AD-61827.2 | GAAGAAAUUGAUCAUAUUGdTdT | 1794 | 553-571 | CAAUAUGAUCAAUUUCUUCdTdT | 2361 |
| AD-61833.2 | GAUCAUAUUGGAAUUAUCUdTdT | 1795 | 562-580 | AGAUAAUUCCAAUAUGAUCdTdT | 2362 |
| AD-61839.2 | GGAAUUAUCUCUUUUCCUGdTdT | 1796 | 571-589 | CAGGAAAAGAGAUAAUUCCdTdT | 2363 |
| AD-61845.2 | CUCUUUUCCUGACUUCAAGdTdT | 1797 | 579-597 | CUUGAAGUCAGGAAAAGAGdTdT | 2364 |
| AD-61851.2 | ACUUCAAGAUUCCGUCUAAdTdT | 1798 | 590-608 | UUAGACGGAAUCUUGAAGUdTdT | 2365 |
| AD-61857.2 | CCGUCUAAUCCUAGAUAUGdTdT | 1799 | 601-619 | CAUAUCUAGGAUUAGACGGdTdT | 2366 |
| AD-61863.2 | CCUAGAUAUGGUAUGUGGAdTdT | 1800 | 610-628 | UCCACAUACCAUAUCUAGGdTdT | 2367 |
| AD-61869.2 | UGUGGACGAUCAAGGCUAAdTdT | 1801 | 623-641 | UUAGCCUUGAUCGUCCACAdTdT | 2368 |
| AD-61828.2 | CGAUCAAGGCUAAAUAUAAdTdT | 1802 | 629-647 | UUAUAUUUAGCCUUGAUCGdTdT | 2369 |
| AD-61834.2 | AUAUAAAGAGGACUUUUCAdTdT | 1803 | 642-660 | UGAAAAGUCCUCUUUAUAUdTdT | 2370 |
| AD-61840.2 | GAGGACUUUUCAACAACUGdTdT | 1804 | 649-667 | CAGUUGUUGAAAAGUCCUCdTdT | 2371 |
| AD-61846.2 | CAACUGGAACCGCAUAUUUdTdT | 1805 | 662-680 | AAAUAUGCGGUUCCAGUUGdTdT | 2372 |
| AD-61852.2 | CGCAUAUUUUGAAGUUAAAdTdT | 1806 | 672-690 | UUUAACUUCAAAAUAUGCGdTdT | 2373 |
| AD-61858.2 | AAGUUAAAGAAUAUGUCUUdTdT | 1807 | 683-701 | AAGACAUAUUCUUUAACUUdTdT | 2374 |
| AD-61864.2 | GAAUAUGUCUUGCCACAUUdTdT | 1808 | 691-709 | AAUGUGGCAAGACAUAUUCdTdT | 2375 |
| AD-61870.2 | CCACAUUUUUCUGUCUCAAdTdT | 1809 | 703-721 | UUGAGACAGAAAAAUGUGGdTdT | 2376 |
| AD-61829.2 | CUGUCUCAAUCGAGCCAGAdTdT | 1810 | 713-731 | UCUGGCUCGAUUGAGACAGdTdT | 2377 |
| AD-61835.2 | CAAUCGAGCCAGAAUAUAAdTdT | 1811 | 719-737 | UUAUAUUCUGGCUCGAUUGdTdT | 2378 |
| AD-61841.2 | GAAUAUAAUUUCAUUGGUUdTdT | 1812 | 730-748 | AACCAAUGAAAUUAUAUUCdTdT | 2379 |
| AD-61847.2 | AUUGGUUACAAGAACUUUAdTdT | 1813 | 742-760 | UAAAGUUCUUGUAACCAAUdTdT | 2380 |
| AD-61853.2 | AGAACUUUAAGAAUUUUGAdTdT | 1814 | 752-770 | UCAAAAUUCUUAAAGUUCUdTdT | 2381 |
| AD-61859.2 | GAAUUUUGAAAUUACUAUAdTdT | 1815 | 762-780 | UAUAGUAAUUUCAAAAUUCdTdT | 2382 |
| AD-61865.2 | GAAAUUACUAUAAAAGCAAdTdT | 1816 | 769-787 | UUGCUUUUAUAGUAAUUUCdTdT | 2383 |
| AD-61871.2 | AAAGCAAGAUAUUUUUAUAdTdT | 1817 | 781-799 | UAUAAAAAUAUCUUGCUUUdTdT | 2384 |
| AD-61830.2 | AUAUUUUUAUAAUAAAGUAdTdT | 1818 | 789-807 | UACUUUAUUAUAAAAAUAUdTdT | 2385 |
| AD-61836.2 | AAGUAGUCACUGAGGCUGAdTdT | 1819 | 803-821 | UCAGCCUCAGUGACUACUUdTdT | 2386 |
| AD-61842.2 | CACUGAGGCUGACGUUUAUdTdT | 1820 | 810-828 | AUAAACGUCAGCCUCAGUGdTdT | 2387 |
| AD-61848.2 | CGUUUAUAUCACAUUUGGAdTdT | 1821 | 822-840 | UCCAAAUGUGAUAUAAACGdTdT | 2388 |
| AD-61854.2 | CACAUUUGGAAUAAGAGAAdTdT | 1822 | 831-849 | UUCUCUUAUUCCAAAUGUGdTdT | 2389 |
| AD-61860.2 | AAUAAGAGAAGACUUAAAAdTdT | 1823 | 840-858 | UUUUAAGUCUUCUCUUAUUdTdT | 2390 |
| AD-61866.2 | CUUAAAAGAUGAUCAAAAAdTdT | 1824 | 852-870 | UUUUUGAUCAUCUUUUAAGdTdT | 2391 |
| AD-61872.2 | GAUGAUCAAAAAGAAAUGAdTdT | 1825 | 859-877 | UCAUUUCUUUUUGAUCAUCdTdT | 2392 |
| AD-61831.2 | AAAUGAUGCAAACAGCAAUdTdT | 1826 | 872-890 | AUUGCUGUUUGCAUCAUUUdTdT | 2393 |
| AD-61837.2 | ACAGCAAUGCAAAACACAAdTdT | 1827 | 883-901 | UUGUGUUUUGCAUUGCUGUdTdT | 2394 |
| AD-61843.2 | AAAACACAAUGUUGAUAAAdTdT | 1828 | 893-911 | UUUAUCAACAUUGUGUUUUdTdT | 2395 |
| AD-61849.2 | CAAUGUUGAUAAAUGGAAUdTdT | 1829 | 899-917 | AUUCCAUUUAUCAACAUUGdTdT | 2396 |
| AD-61855.2 | GGAAUUGCUCAAGUCACAUdTdT | 1830 | 913-931 | AUGUGACUUGAGCAAUUCCdTdT | 2397 |
| AD-61861.2 | GCUCAAGUCACAUUUGAUUdTdT | 1831 | 919-937 | AAUCAAAUGUGACUUGAGCdTdT | 2398 |
| AD-61867.2 | AUUUGAUUCUGAAACAGCAdTdT | 1832 | 930-948 | UGCUGUUUCAGAAUCAAAUdTdT | 2399 |
| AD-62062.1 | UGAAACAGCAGUCAAAGAAdTdT | 1833 | 939-957 | UUCUUUGACUGCUGUUUCAdTdT | 2400 |
| AD-62068.1 | CAAAGAACUGUCAUACUACdTdT | 1834 | 951-969 | GUAGUAUGACAGUUCUUUGdTdT | 2401 |
| AD-62074.1 | CAUACUACAGUUUAGAAGAdTdT | 1835 | 962-980 | UCUUCUAAACUGUAGUAUGdTdT | 2402 |
| AD-62080.1 | CAGUUUAGAAGAUUUAAACdTdT | 1836 | 969-987 | GUUUAAAUCUUCUAAACUGdTdT | 2403 |
| AD-62086.1 | UAAACAACAAGUACCUUUAdTdT | 1837 | 983-1001 | UAAAGGUACUUGUUGUUUAdTdT | 2404 |
| AD-62092.1 | CAAGUACCUUUAUAUUGCUdTdT | 1838 | 990-1008 | AGCAAUAUAAAGGUACUUGdTdT | 2405 |
| AD-62098.1 | UAUUGCUGUAACAGUCAUAdTdT | 1839 | 1002-1020 | UAUGACUGUUACAGCAAUAdTdT | 2406 |
| AD-62104.1 | AACAGUCAUAGAGUCUACAdTdT | 1840 | 1011-1029 | UGUAGACUCUAUGACUGUUdTdT | 2407 |
| AD-62063.1 | AGAGUCUACAGGUGGAUUUdTdT | 1841 | 1020-1038 | AAAUCCACCUGUAGACUCUdTdT | 2408 |
| AD-62069.1 | GGAUUUUCUGAAGAGGCAGdTdT | 1842 | 1033-1051 | CUGCCUCUUCAGAAAAUCCdTdT | 2409 |
| AD-62075.1 | GAAGAGGCAGAAAUACCUGdTdT | 1843 | 1042-1060 | CAGGUAUUUCUGCCUCUUCdTdT | 2410 |
| AD-62081.1 | AGAAAUACCUGGCAUCAAAdTdT | 1844 | 1050-1068 | UUUGAUGCCAGGUAUUUCUdTdT | 2411 |
| AD-62087.1 | GCAUCAAAUAUGUCCUCUCdTdT | 1845 | 1061-1079 | GAGAGGACAUAUUUGAUGCdTdT | 2412 |
| AD-62093.1 | UGUCCUCUCUCCCUACAAAdTdT | 1846 | 1071-1089 | UUUGUAGGGAGAGAGGACAdTdT | 2413 |
| AD-62099.1 | GAAUUUGGUUGCUACUCCUdTdT | 1847 | 1092-1110 | AGGAGUAGCAACCAAAUUCdTdT | 2414 |
| AD-62105.1 | GCUACUCCUCUUUUCCUGAdTdT | 1848 | 1102-1120 | UCAGGAAAAGAGGAGUAGCdTdT | 2415 |
| AD-62064.1 | CUCUUUUCCUGAAGCCUGGdTdT | 1849 | 1109-1127 | CCAGGCUUCAGGAAAAGAGdTdT | 2416 |
| AD-62070.1 | CCUGGGAUUCCAUAUCCCAdTdT | 1850 | 1123-1141 | UGGGAUAUGGAAUCCCAGGdTdT | 2417 |
| AD-62076.1 | CAUAUCCCAUCAAGGUGCAdTdT | 1851 | 1133-1151 | UGCACCUUGAUGGGAUAUGdTdT | 2418 |
| AD-62082.1 | CCAUCAAGGUGCAGGUUAAdTdT | 1852 | 1139-1157 | UUAACCUGCACCUUGAUGGdTdT | 2419 |
| AD-62088.1 | CAGGUUAAAGAUUCGCUUGdTdT | 1853 | 1150-1168 | CAAGCGAAUCUUUAACCUGdTdT | 2420 |
| AD-62094.1 | UUCGCUUGACCAGUUGGUAdTdT | 1854 | 1161-1179 | UACCAACUGGUCAAGCGAAdTdT | 2421 |
| AD-62100.1 | CCAGUUGGUAGGAGGAGUCdTdT | 1855 | 1170-1188 | GACUCCUCCUACCAACUGGdTdT | 2422 |
| AD-62106.1 | GGAGGAGUCCCAGUAACACdTdT | 1856 | 1180-1198 | GUGUUACUGGGACUCCUCCdTdT | 2423 |
| AD-62065.1 | CAGUAACACUGAAUGCACAdTdT | 1857 | 1190-1208 | UGUGCAUUCAGUGUUACUGdTdT | 2424 |
| AD-62071.1 | GAAUGCACAAACAAUUGAUdTdT | 1858 | 1200-1218 | AUCAAUUGUUUGUGCAUUCdTdT | 2425 |
| AD-62077.1 | AACAAUUGAUGUAAACCAAdTdT | 1859 | 1209-1227 | UUGGUUUACAUCAAUUGUUdTdT | 2426 |
| AD-62083.1 | UAAACCAAGAGACAUCUGAdTdT | 1860 | 1220-1238 | UCAGAUGUCUCUUGGUUUAdTdT | 2427 |
| AD-62089.1 | CAUCUGACUUGGAUCCAAGdTdT | 1861 | 1232-1250 | CUUGGAUCCAAGUCAGAUGdTdT | 2428 |
| AD-62095.1 | GAUCCAAGCAAAAGUGUAAdTdT | 1862 | 1243-1261 | UUACACUUUUGCUUGGAUCdTdT | 2429 |
| AD-62101.1 | CAAAAGUGUAACACGUGUUdTdT | 1863 | 1251-1269 | AACACGUGUUACACUUUUGdTdT | 2430 |
| AD-62107.1 | AACACGUGUUGAUGAUGGAdTdT | 1864 | 1260-1278 | UCCAUCAUCAACACGUGUUdTdT | 2431 |
| AD-62066.1 | UGAUGGAGUAGCUUCCUUUdTdT | 1865 | 1272-1290 | AAAGGAAGCUACUCCAUCAdTdT | 2432 |
| AD-62072.1 | GUAGCUUCCUUUGUGCUUAdTdT | 1866 | 1279-1297 | UAAGCACAAAGGAAGCUACdTdT | 2433 |
| AD-62078.1 | GCUUAAUCUCCCAUCUGGAdTdT | 1867 | 1293-1311 | UCCAGAUGGGAGAUUAAGCdTdT | 2434 |
| AD-62084.1 | CCAUCUGGAGUGACGGUGCdTdT | 1868 | 1303-1321 | GCACCGUCACUCCAGAUGGdTdT | 2435 |
| AD-62090.1 | UGACGGUGCUGGAGUUUAAdTdT | 1869 | 1313-1331 | UUAAACUCCAGCACCGUCAdTdT | 2436 |
| AD-62096.1 | GCUGGAGUUUAAUGUCAAAdTdT | 1870 | 1320-1338 | UUUGACAUUAAACUCCAGCdTdT | 2437 |
| AD-62102.1 | UGUCAAAACUGAUGCUCCAdTdT | 1871 | 1332-1350 | UGGAGCAUCAGUUUUGACAdTdT | 2438 |
| AD-62108.1 | GAUGCUCCAGAUCUUCCAGdTdT | 1872 | 1342-1360 | CUGGAAGAUCUGGAGCAUCdTdT | 2439 |
| AD-62067.1 | CAGAUCUUCCAGAAGAAAAdTdT | 1873 | 1349-1367 | UUUUCUUCUGGAAGAUCUGdTdT | 2440 |
| AD-62073.1 | AGAAAAUCAGGCCAGGGAAdTdT | 1874 | 1362-1380 | UUCCCUGGCCUGAUUUUCUdTdT | 2441 |
| AD-62079.1 | GGCCAGGGAAGGUUACCGAdTdT | 1875 | 1371-1389 | UCGGUAACCUUCCCUGGCCdTdT | 2442 |
| AD-62085.1 | GUUACCGAGCAAUAGCAUAdTdT | 1876 | 1382-1400 | UAUGCUAUUGCUCGGUAACdTdT | 2443 |
| AD-62091.1 | AUAGCAUACUCAUCUCUCAdTdT | 1877 | 1393-1411 | UGAGAGAUGAGUAUGCUAUdTdT | 2444 |
| AD-62097.1 | UACUCAUCUCUCAGCCAAAdTdT | 1878 | 1399-1417 | UUUGGCUGAGAGAUGAGUAdTdT | 2445 |
| AD-62103.1 | GCCAAAGUUACCUUUAUAUdTdT | 1879 | 1412-1430 | AUAUAAAGGUAACUUUGGCdTdT | 2446 |
| AD-62109.1 | CCUUUAUAUUGAUUGGACUdTdT | 1880 | 1422-1440 | AGUCCAAUCAAUAUAAAGGdTdT | 2447 |
| AD-62115.1 | GAUUGGACUGAUAACCAUAdTdT | 1881 | 1432-1450 | UAUGGUUAUCAGUCCAAUCdTdT | 2448 |
| AD-62121.1 | CUGAUAACCAUAAGGCUUUdTdT | 1882 | 1439-1457 | AAAGCCUUAUGGUUAUCAGdTdT | 2449 |
| AD-62127.1 | AGGCUUUGCUAGUGGGAGAdTdT | 1883 | 1451-1469 | UCUCCCACUAGCAAAGCCUdTdT | 2450 |
| AD-62133.1 | GUGGGAGAACAUCUGAAUAdTdT | 1884 | 1462-1480 | UAUUCAGAUGUUCUCCCACdTdT | 2451 |
| AD-62139.1 | CAUCUGAAUAUUAUUGUUAdTdT | 1885 | 1471-1489 | UAACAAUAAUAUUCAGAUGdTdT | 2452 |
| AD-62145.1 | UAUUAUUGUUACCCCCAAAdTdT | 1886 | 1479-1497 | UUUGGGGGUAACAAUAAUAdTdT | 2453 |
| AD-62151.1 | CCCAAAAGCCCAUAUAUUGdTdT | 1887 | 1492-1510 | CAAUAUAUGGGCUUUUGGGdTdT | 2454 |
| AD-62110.1 | CCAAAAGCCCAUAUAUUGAdTdT | 1888 | 1493-1511 | UCAAUAUAUGGGCUUUUGGdTdT | 2455 |
| AD-62116.1 | CAAAAGCCCAUAUAUUGACdTdT | 1889 | 1494-1512 | GUCAAUAUAUGGGCUUUUGdTdT | 2456 |
| AD-62122.1 | AAAAGCCCAUAUAUUGACAdTdT | 1890 | 1495-1513 | UGUCAAUAUAUGGGCUUUUdTdT | 2457 |
| AD-62128.1 | AAAGCCCAUAUAUUGACAAdTdT | 1891 | 1496-1514 | UUGUCAAUAUAUGGGCUUUdTdT | 2458 |
| AD-62134.1 | AAGCCCAUAUAUUGACAAAdTdT | 1892 | 1497-1515 | UUUGUCAAUAUAUGGGCUUdTdT | 2459 |
| AD-62140.1 | AGCCCAUAUAUUGACAAAAdTdT | 1893 | 1498-1516 | UUUUGUCAAUAUAUGGGCUdTdT | 2460 |
| AD-62146.1 | GCCCAUAUAUUGACAAAAUdTdT | 1894 | 1499-1517 | AUUUUGUCAAUAUAUGGGCdTdT | 2461 |
| AD-62152.1 | CCCAUAUAUUGACAAAAUAdTdT | 1895 | 1500-1518 | UAUUUUGUCAAUAUAUGGGdTdT | 2462 |
| AD-62111.1 | CCAUAUAUUGACAAAAUAAdTdT | 1896 | 1501-1519 | UUAUUUUGUCAAUAUAUGGdTdT | 2463 |
| AD-62117.1 | CAUAUAUUGACAAAAUAACdTdT | 1897 | 1502-1520 | GUUAUUUUGUCAAUAUAUGdTdT | 2464 |
| AD-62123.1 | AUAUAUUGACAAAAUAACUdTdT | 1898 | 1503-1521 | AGUUAUUUUGUCAAUAUAUdTdT | 2465 |
| AD-62129.1 | UAUAUUGACAAAAUAACUCdTdT | 1899 | 1504-1522 | GAGUUAUUUUGUCAAUAUAdTdT | 2466 |
| AD-62135.1 | AUAUUGACAAAAUAACUCAdTdT | 1900 | 1505-1523 | UGAGUUAUUUUGUCAAUAUdTdT | 2467 |
| AD-62141.1 | UAUUGACAAAAUAACUCACdTdT | 1901 | 1506-1524 | GUGAGUUAUUUUGUCAAUAdTdT | 2468 |
| AD-62147.1 | AUUGACAAAAUAACUCACUdTdT | 1902 | 1507-1525 | AGUGAGUUAUUUUGUCAAUdTdT | 2469 |
| AD-62153.1 | UUGACAAAAUAACUCACUAdTdT | 1903 | 1508-1526 | UAGUGAGUUAUUUUGUCAAdTdT | 2470 |
| AD-62112.1 | UGACAAAAUAACUCACUAUdTdT | 1904 | 1509-1527 | AUAGUGAGUUAUUUUGUCAdTdT | 2471 |
| AD-62118.1 | GACAAAAUAACUCACUAUAdTdT | 1905 | 1510-1528 | UAUAGUGAGUUAUUUUGUCdTdT | 2472 |
| AD-62124.1 | AAAAUAACUCACUAUAAUUdTdT | 1906 | 1513-1531 | AAUUAUAGUGAGUUAUUUUdTdT | 2473 |
| AD-62130.1 | AAAUAACUCACUAUAAUUAdTdT | 1907 | 1514-1532 | UAAUUAUAGUGAGUUAUUUdTdT | 2474 |
| AD-62136.1 | AAUAACUCACUAUAAUUACdTdT | 1908 | 1515-1533 | GUAAUUAUAGUGAGUUAUUdTdT | 2475 |
| AD-62142.1 | AUAACUCACUAUAAUUACUdTdT | 1909 | 1516-1534 | AGUAAUUAUAGUGAGUUAUdTdT | 2476 |
| AD-62148.1 | AACUCACUAUAAUUACUUGdTdT | 1910 | 1518-1536 | CAAGUAAUUAUAGUGAGUUdTdT | 2477 |
| AD-62154.1 | ACUCACUAUAAUUACUUGAdTdT | 1911 | 1519-1537 | UCAAGUAAUUAUAGUGAGUdTdT | 2478 |
| AD-62113.1 | CUCACUAUAAUUACUUGAUdTdT | 1912 | 1520-1538 | AUCAAGUAAUUAUAGUGAGdTdT | 2479 |
| AD-62119.1 | UCACUAUAAUUACUUGAUUdTdT | 1913 | 1521-1539 | AAUCAAGUAAUUAUAGUGAdTdT | 2480 |
| AD-62125.1 | ACUAUAAUUACUUGAUUUUdTdT | 1914 | 1523-1541 | AAAAUCAAGUAAUUAUAGUdTdT | 2481 |
| AD-62131.1 | CUAUAAUUACUUGAUUUUAdTdT | 1915 | 1524-1542 | UAAAAUCAAGUAAUUAUAGdTdT | 2482 |
| AD-62137.1 | UAUAAUUACUUGAUUUUAUdTdT | 1916 | 1525-1543 | AUAAAAUCAAGUAAUUAUAdTdT | 2483 |
| AD-62143.1 | AUAAUUACUUGAUUUUAUCdTdT | 1917 | 1526-1544 | GAUAAAAUCAAGUAAUUAUdTdT | 2484 |
| AD-62149.1 | UAAUUACUUGAUUUUAUCCdTdT | 1918 | 1527-1545 | GGAUAAAAUCAAGUAAUUAdTdT | 2485 |
| AD-62155.1 | AAUUACUUGAUUUUAUCCAdTdT | 1919 | 1528-1546 | UGGAUAAAAUCAAGUAAUUdTdT | 2486 |
| AD-62114.1 | AUUACUUGAUUUUAUCCAAdTdT | 1920 | 1529-1547 | UUGGAUAAAAUCAAGUAAUdTdT | 2487 |
| AD-62120.1 | UUAUCCAAGGGCAAAAUUAdTdT | 1921 | 1540-1558 | UAAUUUUGCCCUUGGAUAAdTdT | 2488 |
| AD-62126.1 | GCAAAAUUAUCCACUUUGGdTdT | 1922 | 1550-1568 | CCAAAGUGGAUAAUUUUGCdTdT | 2489 |
| AD-62132.1 | CACUUUGGCACGAGGGAGAdTdT | 1923 | 1561-1579 | UCUCCCUCGUGCCAAAGUGdTdT | 2490 |
| AD-62138.1 | CGAGGGAGAAAUUUUCAGAdTdT | 1924 | 1571-1589 | UCUGAAAAUUUCUCCCUCGdTdT | 2491 |
| AD-62144.1 | AUUUUCAGAUGCAUCUUAUdTdT | 1925 | 1581-1599 | AUAAGAUGCAUCUGAAAAUdTdT | 2492 |
| AD-62150.1 | GCAUCUUAUCAAAGUAUAAdTdT | 1926 | 1591-1609 | UUAUACUUUGAUAAGAUGCdTdT | 2493 |
| AD-62156.1 | CAAAGUAUAAACAUUCCAGdTdT | 1927 | 1600-1618 | CUGGAAUGUUUAUACUUUGdTdT | 2494 |
| AD-62162.1 | AUUCCAGUAACACAGAACAdTdT | 1928 | 1612-1630 | UGUUCUGUGUUACUGGAAUdTdT | 2495 |
| AD-62168.1 | CACAGAACAUGGUUCCUUCdTdT | 1929 | 1622-1640 | GAAGGAACCAUGUUCUGUGdTdT | 2496 |
| AD-62174.1 | GGUUCCUUCAUCCCGACUUdTdT | 1930 | 1632-1650 | AAGUCGGGAUGAAGGAACCdTdT | 2497 |
| AD-62180.1 | CCCGACUUCUGGUCUAUUAdTdT | 1931 | 1643-1661 | UAAUAGACCAGAAGUCGGGdTdT | 2498 |
| AD-62186.1 | GGUCUAUUACAUCGUCACAdTdT | 1932 | 1653-1671 | UGUGACGAUGUAAUAGACCdTdT | 2499 |
| AD-62192.1 | AUCGUCACAGGAGAACAGAdTdT | 1933 | 1663-1681 | UCUGUUCUCCUGUGACGAUdTdT | 2500 |
| AD-62198.1 | CAGGAGAACAGACAGCAGAdTdT | 1934 | 1670-1688 | UCUGCUGUCUGUUCUCCUGdTdT | 2501 |
| AD-62157.1 | CAGCAGAAUUAGUGUCUGAdTdT | 1935 | 1682-1700 | UCAGACACUAAUUCUGCUGdTdT | 2502 |
| AD-62163.1 | GUGUCUGAUUCAGUCUGGUdTdT | 1936 | 1693-1711 | ACCAGACUGAAUCAGACACdTdT | 2503 |
| AD-62169.1 | CAGUCUGGUUAAAUAUUGAdTdT | 1937 | 1703-1721 | UCAAUAUUUAACCAGACUGdTdT | 2504 |
| AD-62175.1 | GUUAAAUAUUGAAGAAAAAdTdT | 1938 | 1710-1728 | UUUUUCUUCAAUAUUUAACdTdT | 2505 |
| AD-62181.1 | AGAAAAAUGUGGCAACCAGdTdT | 1939 | 1722-1740 | CUGGUUGCCACAUUUUUCUdTdT | 2506 |
| AD-62187.1 | GCAACCAGCUCCAGGUUCAdTdT | 1940 | 1733-1751 | UGAACCUGGAGCUGGUUGCdTdT | 2507 |
| AD-62193.1 | GCUCCAGGUUCAUCUGUCUdTdT | 1941 | 1740-1758 | AGACAGAUGAACCUGGAGCdTdT | 2508 |
| AD-62199.1 | AUCUGUCUCCUGAUGCAGAdTdT | 1942 | 1751-1769 | UCUGCAUCAGGAGACAGAUdTdT | 2509 |
| AD-62158.1 | GAUGCAGAUGCAUAUUCUCdTdT | 1943 | 1762-1780 | GAGAAUAUGCAUCUGCAUCdTdT | 2510 |
| AD-62164.1 | GCAUAUUCUCCAGGCCAAAdTdT | 1944 | 1771-1789 | UUUGGCCUGGAGAAUAUGCdTdT | 2511 |
| AD-62170.1 | AGGCCAAACUGUGUCUCUUdTdT | 1945 | 1782-1800 | AAGAGACACAGUUUGGCCUdTdT | 2512 |
| AD-62176.1 | GUGUCUCUUAAUAUGGCAAdTdT | 1946 | 1792-1810 | UUGCCAUAUUAAGAGACACdTdT | 2513 |
| AD-62182.1 | UUAAUAUGGCAACUGGAAUdTdT | 1947 | 1799-1817 | AUUCCAGUUGCCAUAUUAAdTdT | 2514 |
| AD-62188.1 | AACUGGAAUGGAUUCCUGGdTdT | 1948 | 1809-1827 | CCAGGAAUCCAUUCCAGUUdTdT | 2515 |
| AD-62194.1 | UUCCUGGGUGGCAUUAGCAdTdT | 1949 | 1821-1839 | UGCUAAUGCCACCCAGGAAdTdT | 2516 |
| AD-62200.1 | GGCAUUAGCAGCAGUGGACdTdT | 1950 | 1830-1848 | GUCCACUGCUGCUAAUGCCdTdT | 2517 |
| AD-62159.1 | AGUGGACAGUGCUGUGUAUdTdT | 1951 | 1842-1860 | AUACACAGCACUGUCCACUdTdT | 2518 |
| AD-62165.1 | GCUGUGUAUGGAGUCCAAAdTdT | 1952 | 1852-1870 | UUUGGACUCCAUACACAGCdTdT | 2519 |
| AD-62171.1 | AGUCCAAAGAGGAGCCAAAdTdT | 1953 | 1863-1881 | UUUGGCUCCUCUUUGGACUdTdT | 2520 |
| AD-62177.1 | AGAGGAGCCAAAAAGCCCUdTdT | 1954 | 1870-1888 | AGGGCUUUUUGGCUCCUCUdTdT | 2521 |
| AD-62183.1 | AGCCCUUGGAAAGAGUAUUdTdT | 1955 | 1883-1901 | AAUACUCUUUCCAAGGGCUdTdT | 2522 |
| AD-62189.1 | AAGAGUAUUUCAAUUCUUAdTdT | 1956 | 1893-1911 | UAAGAAUUGAAAUACUCUUdTdT | 2523 |
| AD-62195.1 | UUUCAAUUCUUAGAGAAGAdTdT | 1957 | 1900-1918 | UCUUCUCUAAGAAUUGAAAdTdT | 2524 |
| AD-62201.1 | GAGAAGAGUGAUCUGGGCUdTdT | 1958 | 1912-1930 | AGCCCAGAUCACUCUUCUCdTdT | 2525 |
| AD-62160.1 | UGAUCUGGGCUGUGGGGCAdTdT | 1959 | 1920-1938 | UGCCCCACAGCCCAGAUCAdTdT | 2526 |
| AD-62166.1 | GGGGCAGGUGGUGGCCUCAdTdT | 1960 | 1933-1951 | UGAGGCCACCACCUGCCCCdTdT | 2527 |
| AD-62172.1 | GUGGCCUCAACAAUGCCAAdTdT | 1961 | 1943-1961 | UUGGCAUUGUUGAGGCCACdTdT | 2528 |
| AD-62178.1 | CAACAAUGCCAAUGUGUUCdTdT | 1962 | 1950-1968 | GAACACAUUGGCAUUGUUGdTdT | 2529 |
| AD-62184.1 | CAAUGUGUUCCACCUAGCUdTdT | 1963 | 1959-1977 | AGCUAGGUGGAACACAUUGdTdT | 2530 |
| AD-62190.1 | CACCUAGCUGGACUUACCUdTdT | 1964 | 1969-1987 | AGGUAAGUCCAGCUAGGUGdTdT | 2531 |
| AD-62196.1 | GACUUACCUUCCUCACUAAdTdT | 1965 | 1979-1997 | UUAGUGAGGAAGGUAAGUCdTdT | 2532 |
| AD-62202.1 | UCACUAAUGCAAAUGCAGAdTdT | 1966 | 1991-2009 | UCUGCAUUUGCAUUAGUGAdTdT | 2533 |
| AD-62161.1 | AAAUGCAGAUGACUCCCAAdTdT | 1967 | 2001-2019 | UUGGGAGUCAUCUGCAUUUdTdT | 2534 |
| AD-62167.1 | CUCCCAAGAAAAUGAUGAAdTdT | 1968 | 2013-2031 | UUCAUCAUUUUCUUGGGAGdTdT | 2535 |
| AD-62173.1 | CCUUGUAAAGAAAUUCUCAdTdT | 1969 | 2032-2050 | UGAGAAUUUCUUUACAAGGdTdT | 2536 |
| AD-62179.1 | AAUUCUCAGGCCAAGAAGAdTdT | 1970 | 2043-2061 | UCUUCUUGGCCUGAGAAUUdTdT | 2537 |
| AD-62185.1 | CCAAGAAGAACGCUGCAAAdTdT | 1971 | 2053-2071 | UUUGCAGCGUUCUUCUUGGdTdT | 2538 |
| AD-62191.1 | CGCUGCAAAAGAAGAUAGAdTdT | 1972 | 2063-2081 | UCUAUCUUCUUUUGCAGCGdTdT | 2539 |
| AD-62197.1 | AAAGAAGAUAGAAGAAAUAdTdT | 1973 | 2070-2088 | UAUUUCUUCUAUCUUCUUUdTdT | 2540 |
| AD-62203.1 | AGAAAUAGCUGCUAAAUAUdTdT | 1974 | 2082-2100 | AUAUUUAGCAGCUAUUUCUdTdT | 2541 |
| AD-62209.1 | GCUGCUAAAUAUAAACAUUdTdT | 1975 | 2089-2107 | AAUGUUUAUAUUUAGCAGCdTdT | 2542 |
| AD-62215.1 | ACAUUCAGUAGUGAAGAAAdTdT | 1976 | 2103-2121 | UUUCUUCACUACUGAAUGUdTdT | 2543 |
| AD-62221.1 | GUAGUGAAGAAAUGUUGUUdTdT | 1977 | 2110-2128 | AACAACAUUUCUUCACUACdTdT | 2544 |
| AD-62227.1 | AAAUGUUGUUACGAUGGAGdTdT | 1978 | 2119-2137 | CUCCAUCGUAACAACAUUUdTdT | 2545 |
| AD-62233.1 | CGAUGGAGCCUGCGUUAAUdTdT | 1979 | 2130-2148 | AUUAACGCAGGCUCCAUCGdTdT | 2546 |
| AD-62239.1 | CGUUAAUAAUGAUGAAACCdTdT | 1980 | 2142-2160 | GGUUUCAUCAUUAUUAACGdTdT | 2547 |
| AD-62245.1 | AUGAUGAAACCUGUGAGCAdTdT | 1981 | 2150-2168 | UGCUCACAGGUUUCAUCAUdTdT | 2548 |
| AD-62204.1 | CUGUGAGCAGCGAGCUGCAdTdT | 1982 | 2160-2178 | UGCAGCUCGCUGCUCACAGdTdT | 2549 |
| AD-62210.1 | CGAGCUGCACGGAUUAGUUdTdT | 1983 | 2170-2188 | AACUAAUCCGUGCAGCUCGdTdT | 2550 |
| AD-62216.1 | GGAUUAGUUUAGGGCCAAGdTdT | 1984 | 2180-2198 | CUUGGCCCUAAACUAAUCCdTdT | 2551 |
| AD-62222.1 | GGGCCAAGAUGCAUCAAAGdTdT | 1985 | 2191-2209 | CUUUGAUGCAUCUUGGCCCdTdT | 2552 |
| AD-62228.1 | CAUCAAAGCUUUCACUGAAdTdT | 1986 | 2202-2220 | UUCAGUGAAAGCUUUGAUGdTdT | 2553 |
| AD-62234.1 | GCUUUCACUGAAUGUUGUGdTdT | 1987 | 2209-2227 | CACAACAUUCAGUGAAAGCdTdT | 2554 |
| AD-62240.1 | AAUGUUGUGUCGUCGCAAGdTdT | 1988 | 2219-2237 | CUUGCGACGACACAACAUUdTdT | 2555 |
| AD-62246.1 | CGUCGCAAGCCAGCUCCGUdTdT | 1989 | 2229-2247 | ACGGAGCUGGCUUGCGACGdTdT | 2556 |
| AD-62205.1 | GCUCCGUGCUAAUAUCUCUdTdT | 1990 | 2241-2259 | AGAGAUAUUAGCACGGAGCdTdT | 2557 |
| AD-62211.1 | CUAAUAUCUCUCAUAAAGAdTdT | 1991 | 2249-2267 | UCUUUAUGAGAGAUAUUAGdTdT | 2558 |
| AD-62217.1 | AAAGACAUGCAAUUGGGAAdTdT | 1992 | 2263-2281 | UUCCCAAUUGCAUGUCUUUdTdT | 2559 |
| AD-62223.1 | CAAUUGGGAAGGCUACACAdTdT | 1993 | 2272-2290 | UGUGUAGCCUUCCCAAUUGdTdT | 2560 |
| AD-62229.1 | GCUACACAUGAAGACCCUGdTdT | 1994 | 2283-2301 | CAGGGUCUUCAUGUGUAGCdTdT | 2561 |
| AD-62235.1 | CAUGAAGACCCUGUUACCAdTdT | 1995 | 2289-2307 | UGGUAACAGGGUCUUCAUGdTdT | 2562 |
| AD-62241.1 | UACCAGUAAGCAAGCCAGAdTdT | 1996 | 2303-2321 | UCUGGCUUGCUUACUGGUAdTdT | 2563 |
| AD-62247.1 | AGCAAGCCAGAAAUUCGGAdTdT | 1997 | 2311-2329 | UCCGAAUUUCUGGCUUGCUdTdT | 2564 |
| AD-62206.1 | AGAAAUUCGGAGUUAUUUUdTdT | 1998 | 2319-2337 | AAAAUAACUCCGAAUUUCUdTdT | 2565 |
| AD-62212.1 | AGUUAUUUUCCAGAAAGCUdTdT | 1999 | 2329-2347 | AGCUUUCUGGAAAAUAACUdTdT | 2566 |
| AD-62218.1 | CAGAAAGCUGGUUGUGGGAdTdT | 2000 | 2339-2357 | UCCCACAACCAGCUUUCUGdTdT | 2567 |
| AD-62224.1 | GUGGGAAGUUCAUCUUGUUdTdT | 2001 | 2352-2370 | AACAAGAUGAACUUCCCACdTdT | 2568 |
| AD-62230.1 | UCAUCUUGUUCCCAGAAGAdTdT | 2002 | 2361-2379 | UCUUCUGGGAACAAGAUGAdTdT | 2569 |
| AD-62236.1 | CCAGAAGAAAACAGUUGCAdTdT | 2003 | 2372-2390 | UGCAACUGUUUUCUUCUGGdTdT | 2570 |
| AD-62242.1 | CAGUUGCAGUUUGCCCUACdTdT | 2004 | 2383-2401 | GUAGGGCAAACUGCAACUGdTdT | 2571 |
| AD-62248.1 | CAGUUUGCCCUACCUGAUUdTdT | 2005 | 2389-2407 | AAUCAGGUAGGGCAAACUGdTdT | 2572 |
| AD-62207.1 | CCUGAUUCUCUAACCACCUdTdT | 2006 | 2401-2419 | AGGUGGUUAGAGAAUCAGGdTdT | 2573 |
| AD-62213.1 | ACCACCUGGGAAAUUCAAGdTdT | 2007 | 2413-2431 | CUUGAAUUUCCCAGGUGGUdTdT | 2574 |
| AD-62219.1 | GAAAUUCAAGGCGUUGGCAdTdT | 2008 | 2422-2440 | UGCCAACGCCUUGAAUUUCdTdT | 2575 |
| AD-62225.1 | CGUUGGCAUUUCAAACACUdTdT | 2009 | 2433-2451 | AGUGUUUGAAAUGCCAACGdTdT | 2576 |
| AD-62231.1 | CAUUUCAAACACUGGUAUAdTdT | 2010 | 2439-2457 | UAUACCAGUGUUUGAAAUGdTdT | 2577 |
| AD-62237.1 | GUAUAUGUGUUGCUGAUACdTdT | 2011 | 2453-2471 | GUAUCAGCAACACAUAUACdTdT | 2578 |
| AD-62243.1 | UGCUGAUACUGUCAAGGCAdTdT | 2012 | 2463-2481 | UGCCUUGACAGUAUCAGCAdTdT | 2579 |
| AD-62249.1 | CUGUCAAGGCAAAGGUGUUdTdT | 2013 | 2471-2489 | AACACCUUUGCCUUGACAGdTdT | 2580 |
| AD-62208.1 | AGGUGUUCAAAGAUGUCUUdTdT | 2014 | 2483-2501 | AAGACAUCUUUGAACACCUdTdT | 2581 |
| AD-62214.1 | CAAAGAUGUCUUCCUGGAAdTdT | 2015 | 2490-2508 | UUCCAGGAAGACAUCUUUGdTdT | 2582 |
| AD-62220.1 | CUUCCUGGAAAUGAAUAUAdTdT | 2016 | 2499-2517 | UAUAUUCAUUUCCAGGAAGdTdT | 2583 |
| AD-62226.1 | GAAUAUACCAUAUUCUGUUdTdT | 2017 | 2511-2529 | AACAGAAUAUGGUAUAUUCdTdT | 2584 |
| AD-62232.1 | AUAUUCUGUUGUACGAGGAdTdT | 2018 | 2520-2538 | UCCUCGUACAACAGAAUAUdTdT | 2585 |
| AD-62238.1 | CGAGGAGAACAGAUCCAAUdTdT | 2019 | 2533-2551 | AUUGGAUCUGUUCUCCUCGdTdT | 2586 |
| AD-62244.1 | GAACAGAUCCAAUUGAAAGdTdT | 2020 | 2539-2557 | CUUUCAAUUGGAUCUGUUCdTdT | 2587 |
| AD-61874.1 | GAAAGGAACUGUUUACAACdTdT | 2021 | 2553-2571 | GUUGUAAACAGUUCCUUUCdTdT | 2588 |
| AD-61880.1 | ACUGUUUACAACUAUAGGAdTdT | 2022 | 2560-2578 | UCCUAUAGUUGUAAACAGUdTdT | 2589 |
| AD-61886.1 | AACUAUAGGACUUCUGGGAdTdT | 2023 | 2569-2587 | UCCCAGAAGUCCUAUAGUUdTdT | 2590 |
| AD-61892.1 | UGGGAUGCAGUUCUGUGUUdTdT | 2024 | 2583-2601 | AACACAGAACUGCAUCCCAdTdT | 2591 |
| AD-61898.1 | GUUCUGUGUUAAAAUGUCUdTdT | 2025 | 2592-2610 | AGACAUUUUAACACAGAACdTdT | 2592 |
| AD-61904.1 | UUAAAAUGUCUGCUGUGGAdTdT | 2026 | 2600-2618 | UCCACAGCAGACAUUUUAAdTdT | 2593 |
| AD-61910.1 | CUGUGGAGGGAAUCUGCACdTdT | 2027 | 2612-2630 | GUGCAGAUUCCCUCCACAGdTdT | 2594 |
| AD-61916.1 | GGAAUCUGCACUUCGGAAAdTdT | 2028 | 2620-2638 | UUUCCGAAGUGCAGAUUCCdTdT | 2595 |
| AD-61875.1 | CGGAAAGCCCAGUCAUUGAdTdT | 2029 | 2633-2651 | UCAAUGACUGGGCUUUCCGdTdT | 2596 |
| AD-61881.1 | CCAGUCAUUGAUCAUCAGGdTdT | 2030 | 2641-2659 | CCUGAUGAUCAAUGACUGGdTdT | 2597 |
| AD-61887.1 | CAUCAGGGCACAAAGUCCUdTdT | 2031 | 2653-2671 | AGGACUUUGUGCCCUGAUGdTdT | 2598 |
| AD-61893.1 | GGCACAAAGUCCUCCAAAUdTdT | 2032 | 2659-2677 | AUUUGGAGGACUUUGUGCCdTdT | 2599 |
| AD-61899.1 | CAAAUGUGUGCGCCAGAAAdTdT | 2033 | 2673-2691 | UUUCUGGCGCACACAUUUGdTdT | 2600 |
| AD-61905.1 | GCGCCAGAAAGUAGAGGGCdTdT | 2034 | 2682-2700 | GCCCUCUACUUUCUGGCGCdTdT | 2601 |
| AD-61911.1 | AGUAGAGGGCUCCUCCAGUdTdT | 2035 | 2691-2709 | ACUGGAGGAGCCCUCUACUdTdT | 2602 |
| AD-61917.1 | CCUCCAGUCACUUGGUGACdTdT | 2036 | 2702-2720 | GUCACCAAGUGACUGGAGGdTdT | 2603 |
| AD-61876.1 | UCACUUGGUGACAUUCACUdTdT | 2037 | 2709-2727 | AGUGAAUGUCACCAAGUGAdTdT | 2604 |
| AD-61882.1 | CAUUCACUGUGCUUCCUCUdTdT | 2038 | 2720-2738 | AGAGGAAGCACAGUGAAUGdTdT | 2605 |
| AD-61888.1 | GGAAAUUGGCCUUCACAACdTdT | 2039 | 2739-2757 | GUUGUGAAGGCCAAUUUCCdTdT | 2606 |
| AD-61894.1 | CUUCACAACAUCAAUUUUUdTdT | 2040 | 2749-2767 | AAAAAUUGAUGUUGUGAAGdTdT | 2607 |
| AD-61900.1 | AAUUUUUCACUGGAGACUUdTdT | 2041 | 2761-2779 | AAGUCUCCAGUGAAAAAUUdTdT | 2608 |
| AD-61906.1 | CUGGAGACUUGGUUUGGAAdTdT | 2042 | 2770-2788 | UUCCAAACCAAGUCUCCAGdTdT | 2609 |
| AD-61912.1 | GGUUUGGAAAAGAAAUCUUdTdT | 2043 | 2780-2798 | AAGAUUUCUUUUCCAAACCdTdT | 2610 |
| AD-61918.1 | AAUCUUAGUAAAAACAUUAdTdT | 2044 | 2793-2811 | UAAUGUUUUUACUAAGAUUdTdT | 2611 |
| AD-61877.1 | AAAAACAUUACGAGUGGUGdTdT | 2045 | 2802-2820 | CACCACUCGUAAUGUUUUUdTdT | 2612 |
| AD-61883.1 | GAGUGGUGCCAGAAGGUGUdTdT | 2046 | 2813-2831 | ACACCUUCUGGCACCACUCdTdT | 2613 |
| AD-61889.1 | AGAAGGUGUCAAAAGGGAAdTdT | 2047 | 2823-2841 | UUCCCUUUUGACACCUUCUdTdT | 2614 |
| AD-61895.1 | UGUCAAAAGGGAAAGCUAUdTdT | 2048 | 2829-2847 | AUAGCUUUCCCUUUUGACAdTdT | 2615 |
| AD-61901.1 | GCUAUUCUGGUGUUACUUUdTdT | 2049 | 2843-2861 | AAAGUAACACCAGAAUAGCdTdT | 2616 |
| AD-61907.1 | GUGUUACUUUGGAUCCUAGdTdT | 2050 | 2852-2870 | CUAGGAUCCAAAGUAACACdTdT | 2617 |
| AD-61913.1 | GGAUCCUAGGGGUAUUUAUdTdT | 2051 | 2862-2880 | AUAAAUACCCCUAGGAUCCdTdT | 2618 |
| AD-61919.1 | GGUAUUUAUGGUACCAUUAdTdT | 2052 | 2872-2890 | UAAUGGUACCAUAAAUACCdTdT | 2619 |
| AD-61878.1 | GUACCAUUAGCAGACGAAAdTdT | 2053 | 2882-2900 | UUUCGUCUGCUAAUGGUACdTdT | 2620 |
| AD-61884.1 | CAGACGAAAGGAGUUCCCAdTdT | 2054 | 2892-2910 | UGGGAACUCCUUUCGUCUGdTdT | 2621 |
| AD-61890.1 | AGGAGUUCCCAUACAGGAUdTdT | 2055 | 2900-2918 | AUCCUGUAUGGGAACUCCUdTdT | 2622 |
| AD-61896.1 | CAUACAGGAUACCCUUAGAdTdT | 2056 | 2909-2927 | UCUAAGGGUAUCCUGUAUGdTdT | 2623 |
| AD-61902.1 | CUUAGAUUUGGUCCCCAAAdTdT | 2057 | 2922-2940 | UUUGGGGACCAAAUCUAAGdTdT | 2624 |
| AD-61908.1 | UCCCCAAAACAGAAAUCAAdTdT | 2058 | 2933-2951 | UUGAUUUCUGUUUUGGGGAdTdT | 2625 |
| AD-61914.1 | ACAGAAAUCAAAAGGAUUUdTdT | 2059 | 2941-2959 | AAAUCCUUUUGAUUUCUGUdTdT | 2626 |
| AD-61920.1 | AAAGGAUUUUGAGUGUAAAdTdT | 2060 | 2951-2969 | UUUACACUCAAAAUCCUUUdTdT | 2627 |
| AD-61879.1 | AGUGUAAAAGGACUGCUUGdTdT | 2061 | 2962-2980 | CAAGCAGUCCUUUUACACUdTdT | 2628 |
| AD-61885.1 | AAGGACUGCUUGUAGGUGAdTdT | 2062 | 2969-2987 | UCACCUACAAGCAGUCCUUdTdT | 2629 |
| AD-61891.1 | GUAGGUGAGAUCUUGUCUGdTdT | 2063 | 2980-2998 | CAGACAAGAUCUCACCUACdTdT | 2630 |
| AD-61897.1 | AUCUUGUCUGCAGUUCUAAdTdT | 2064 | 2989-3007 | UUAGAACUGCAGACAAGAUdTdT | 2631 |
| AD-61903.1 | GUUCUAAGUCAGGAAGGCAdTdT | 2065 | 3001-3019 | UGCCUUCCUGACUUAGAACdTdT | 2632 |
| AD-61909.1 | GAAGGCAUCAAUAUCCUAAdTdT | 2066 | 3013-3031 | UUAGGAUAUUGAUGCCUUCdTdT | 2633 |
| AD-61915.1 | UCAAUAUCCUAACCCACCUdTdT | 2067 | 3020-3038 | AGGUGGGUUAGGAUAUUGAdTdT | 2634 |
| AD-61921.1 | CCACCUCCCCAAAGGGAGUdTdT | 2068 | 3033-3051 | ACUCCCUUUGGGGAGGUGGdTdT | 2635 |
| AD-61927.1 | CCCCAAAGGGAGUGCAGAGdTdT | 2069 | 3039-3057 | CUCUGCACUCCCUUUGGGGdTdT | 2636 |
| AD-61933.1 | GUGCAGAGGCGGAGCUGAUdTdT | 2070 | 3050-3068 | AUCAGCUCCGCCUCUGCACdTdT | 2637 |
| AD-61939.1 | GGAGCUGAUGAGCGUUGUCdTdT | 2071 | 3060-3078 | GACAACGCUCAUCAGCUCCdTdT | 2638 |
| AD-61945.1 | CGUUGUCCCAGUAUUCUAUdTdT | 2072 | 3072-3090 | AUAGAAUACUGGGACAACGdTdT | 2639 |
| AD-61951.1 | CCAGUAUUCUAUGUUUUUCdTdT | 2073 | 3079-3097 | GAAAAACAUAGAAUACUGGdTdT | 2640 |
| AD-61957.1 | GUUUUUCACUACCUGGAAAdTdT | 2074 | 3091-3109 | UUUCCAGGUAGUGAAAAACdTdT | 2641 |
| AD-61963.1 | CCUGGAAACAGGAAAUCAUdTdT | 2075 | 3102-3120 | AUGAUUUCCUGUUUCCAGGdTdT | 2642 |
| AD-61922.1 | GGAACAUUUUUCAUUCUGAdTdT | 2076 | 3122-3140 | UCAGAAUGAAAAAUGUUCCdTdT | 2643 |
| AD-61928.1 | CAUUCUGACCCAUUAAUUGdTdT | 2077 | 3133-3151 | CAAUUAAUGGGUCAGAAUGdTdT | 2644 |
| AD-61934.1 | CCAUUAAUUGAAAAGCAGAdTdT | 2078 | 3142-3160 | UCUGCUUUUCAAUUAAUGGdTdT | 2645 |
| AD-61940.1 | AAAGCAGAAACUGAAGAAAdTdT | 2079 | 3153-3171 | UUUCUUCAGUUUCUGCUUUdTdT | 2646 |
| AD-61946.1 | AACUGAAGAAAAAAUUAAAdTdT | 2080 | 3161-3179 | UUUAAUUUUUUCUUCAGUUdTdT | 2647 |
| AD-61952.1 | AAAAAAUUAAAAGAAGGGAdTdT | 2081 | 3169-3187 | UCCCUUCUUUUAAUUUUUUdTdT | 2648 |
| AD-61958.1 | AGGGAUGUUGAGCAUUAUGdTdT | 2082 | 3183-3201 | CAUAAUGCUCAACAUCCCUdTdT | 2649 |
| AD-61964.1 | GAGCAUUAUGUCCUACAGAdTdT | 2083 | 3192-3210 | UCUGUAGGACAUAAUGCUCdTdT | 2650 |
| AD-61923.1 | UGUCCUACAGAAAUGCUGAdTdT | 2084 | 3200-3218 | UCAGCAUUUCUGUAGGACAdTdT | 2651 |
| AD-61929.1 | AAUGCUGACUACUCUUACAdTdT | 2085 | 3211-3229 | UGUAAGAGUAGUCAGCAUUdTdT | 2652 |
| AD-61935.1 | UACUCUUACAGUGUGUGGAdTdT | 2086 | 3220-3238 | UCCACACACUGUAAGAGUAdTdT | 2653 |
| AD-61941.1 | AGUGUGUGGAAGGGUGGAAdTdT | 2087 | 3229-3247 | UUCCACCCUUCCACACACUdTdT | 2654 |
| AD-61947.1 | GGGUGGAAGUGCUAGCACUdTdT | 2088 | 3240-3258 | AGUGCUAGCACUUCCACCCdTdT | 2655 |
| AD-61953.1 | GCUAGCACUUGGUUAACAGdTdT | 2089 | 3250-3268 | CUGUUAACCAAGUGCUAGCdTdT | 2656 |
| AD-61959.1 | GGUUAACAGCUUUUGCUUUdTdT | 2090 | 3260-3278 | AAAGCAAAAGCUGUUAACCdTdT | 2657 |
| AD-61965.1 | UGCUUUAAGAGUACUUGGAdTdT | 2091 | 3273-3291 | UCCAAGUACUCUUAAAGCAdTdT | 2658 |
| AD-61924.1 | GUACUUGGACAAGUAAAUAdTdT | 2092 | 3283-3301 | UAUUUACUUGUCCAAGUACdTdT | 2659 |
| AD-61930.1 | CAAGUAAAUAAAUACGUAGdTdT | 2093 | 3292-3310 | CUACGUAUUUAUUUACUUGdTdT | 2660 |
| AD-61936.1 | AUAAAUACGUAGAGCAGAAdTdT | 2094 | 3299-3317 | UUCUGCUCUACGUAUUUAUdTdT | 2661 |
| AD-61942.1 | GAGCAGAACCAAAAUUCAAdTdT | 2095 | 3310-3328 | UUGAAUUUUGGUUCUGCUCdTdT | 2662 |
| AD-61948.1 | AAUUCAAUUUGUAAUUCUUdTdT | 2096 | 3322-3340 | AAGAAUUACAAAUUGAAUUdTdT | 2663 |
| AD-61954.1 | GUAAUUCUUUAUUGUGGCUdTdT | 2097 | 3332-3350 | AGCCACAAUAAAGAAUUACdTdT | 2664 |
| AD-61960.1 | AUUGUGGCUAGUUGAGAAUdTdT | 2098 | 3342-3360 | AUUCUCAACUAGCCACAAUdTdT | 2665 |
| AD-61966.1 | CUAGUUGAGAAUUAUCAAUdTdT | 2099 | 3349-3367 | AUUGAUAAUUCUCAACUAGdTdT | 2666 |
| AD-61925.1 | UUAUCAAUUAGAUAAUGGAdTdT | 2100 | 3360-3378 | UCCAUUAUCUAAUUGAUAAdTdT | 2667 |
| AD-61931.1 | AAUGGAUCUUUCAAGGAAAdTdT | 2101 | 3373-3391 | UUUCCUUGAAAGAUCCAUUdTdT | 2668 |
| AD-61937.1 | CUUUCAAGGAAAAUUCACAdTdT | 2102 | 3380-3398 | UGUGAAUUUUCCUUGAAAGdTdT | 2669 |
| AD-61943.1 | AAUUCACAGUAUCAACCAAdTdT | 2103 | 3391-3409 | UUGGUUGAUACUGUGAAUUdTdT | 2670 |
| AD-61949.1 | GUAUCAACCAAUAAAAUUAdTdT | 2104 | 3399-3417 | UAAUUUUAUUGGUUGAUACdTdT | 2671 |
| AD-61955.1 | AAAAUUACAGGGUACCUUGdTdT | 2105 | 3411-3429 | CAAGGUACCCUGUAAUUUUdTdT | 2672 |
| AD-61961.1 | AGGGUACCUUGCCUGUUGAdTdT | 2106 | 3419-3437 | UCAACAGGCAAGGUACCCUdTdT | 2673 |
| AD-61967.1 | GUUGAAGCCCGAGAGAACAdTdT | 2107 | 3433-3451 | UGUUCUCUCGGGCUUCAACdTdT | 2674 |
| AD-61926.1 | CCGAGAGAACAGCUUAUAUdTdT | 2108 | 3441-3459 | AUAUAAGCUGUUCUCUCGGdTdT | 2675 |
| AD-61932.1 | GCUUAUAUCUUACAGCCUUdTdT | 2109 | 3452-3470 | AAGGCUGUAAGAUAUAAGCdTdT | 2676 |
| AD-61938.1 | CUUACAGCCUUUACUGUGAdTdT | 2110 | 3460-3478 | UCACAGUAAAGGCUGUAAGdTdT | 2677 |
| AD-61944.1 | GAAUUAGAAAGGCUUUCGAdTdT | 2111 | 3482-3500 | UCGAAAGCCUUUCUAAUUCdTdT | 2678 |
| AD-61950.1 | GGCUUUCGAUAUAUGCCCCdTdT | 2112 | 3492-3510 | GGGGCAUAUAUCGAAAGCCdTdT | 2679 |
| AD-61956.1 | GAUAUAUGCCCCCUGGUGAdTdT | 2113 | 3499-3517 | UCACCAGGGGGCAUAUAUCdTdT | 2680 |
| AD-61962.1 | GGUGAAAAUCGACACAGCUdTdT | 2114 | 3513-3531 | AGCUGUGUCGAUUUUCACCdTdT | 2681 |
| AD-61968.1 | CGACACAGCUCUAAUUAAAdTdT | 2115 | 3522-3540 | UUUAAUUAGAGCUGUGUCGdTdT | 2682 |
| AD-61974.1 | GCUCUAAUUAAAGCUGACAdTdT | 2116 | 3529-3547 | UGUCAGCUUUAAUUAGAGCdTdT | 2683 |
| AD-61980.1 | CUGACAACUUUCUGCUUGAdTdT | 2117 | 3542-3560 | UCAAGCAGAAAGUUGUCAGdTdT | 2684 |
| AD-61986.1 | CUUUCUGCUUGAAAAUACAdTdT | 2118 | 3549-3567 | UGUAUUUUCAAGCAGAAAGdTdT | 2685 |
| AD-61992.1 | AAAAUACACUGCCAGCCCAdTdT | 2119 | 3560-3578 | UGGGCUGGCAGUGUAUUUUdTdT | 2686 |
| AD-61998.1 | AGCCCAGAGCACCUUUACAdTdT | 2120 | 3573-3591 | UGUAAAGGUGCUCUGGGCUdTdT | 2687 |
| AD-62004.1 | GCACCUUUACAUUGGCCAUdTdT | 2121 | 3581-3599 | AUGGCCAAUGUAAAGGUGCdTdT | 2688 |
| AD-62010.1 | ACAUUGGCCAUUUCUGCGUdTdT | 2122 | 3589-3607 | ACGCAGAAAUGGCCAAUGUdTdT | 2689 |
| AD-61969.1 | CUGCGUAUGCUCUUUCCCUdTdT | 2123 | 3602-3620 | AGGGAAAGAGCAUACGCAGdTdT | 2690 |
| AD-61975.1 | CUUUCCCUGGGAGAUAAAAdTdT | 2124 | 3613-3631 | UUUUAUCUCCCAGGGAAAGdTdT | 2691 |
| AD-61981.1 | GAGAUAAAACUCACCCACAdTdT | 2125 | 3623-3641 | UGUGGGUGAGUUUUAUCUCdTdT | 2692 |
| AD-61987.1 | ACUCACCCACAGUUUCGUUdTdT | 2126 | 3631-3649 | AACGAAACUGUGGGUGAGUdTdT | 2693 |
| AD-61993.1 | CAGUUUCGUUCAAUUGUUUdTdT | 2127 | 3640-3658 | AAACAAUUGAACGAAACUGdTdT | 2694 |
| AD-61999.1 | CAAUUGUUUCAGCUUUGAAdTdT | 2128 | 3650-3668 | UUCAAAGCUGAAACAAUUGdTdT | 2695 |
| AD-62005.1 | CUUUGAAGAGAGAAGCUUUdTdT | 2129 | 3662-3680 | AAAGCUUCUCUCUUCAAAGdTdT | 2696 |
| AD-62011.1 | GAGAGAAGCUUUGGUUAAAdTdT | 2130 | 3669-3687 | UUUAACCAAAGCUUCUCUCdTdT | 2697 |
| AD-61970.1 | GUUAAAGGUAAUCCACCCAdTdT | 2131 | 3682-3700 | UGGGUGGAUUACCUUUAACdTdT | 2698 |
| AD-61976.1 | AAUCCACCCAUUUAUCGUUdTdT | 2132 | 3691-3709 | AACGAUAAAUGGGUGGAUUdTdT | 2699 |
| AD-61982.1 | CAUUUAUCGUUUUUGGAAAdTdT | 2133 | 3699-3717 | UUUCCAAAAACGAUAAAUGdTdT | 2700 |
| AD-61988.1 | UUUGGAAAGACAAUCUUCAdTdT | 2134 | 3710-3728 | UGAAGAUUGUCUUUCCAAAdTdT | 2701 |
| AD-61994.1 | AAUCUUCAGCAUAAAGACAdTdT | 2135 | 3721-3739 | UGUCUUUAUGCUGAAGAUUdTdT | 2702 |
| AD-62006.1 | CUCUGUACCUAACACUGGUdTdT | 2136 | 3741-3759 | ACCAGUGUUAGGUACAGAGdTdT | 2703 |
| AD-62012.1 | ACACUGGUACGGCACGUAUdTdT | 2137 | 3752-3770 | AUACGUGCCGUACCAGUGUdTdT | 2704 |
| AD-61971.1 | GGCACGUAUGGUAGAAACAdTdT | 2138 | 3762-3780 | UGUUUCUACCAUACGUGCCdTdT | 2705 |
| AD-61977.1 | GGUAGAAACAACUGCCUAUdTdT | 2139 | 3771-3789 | AUAGGCAGUUGUUUCUACCdTdT | 2706 |
| AD-61983.1 | CAACUGCCUAUGCUUUACUdTdT | 2140 | 3779-3797 | AGUAAAGCAUAGGCAGUUGdTdT | 2707 |
| AD-61989.1 | CUUUACUCACCAGUCUGAAdTdT | 2141 | 3791-3809 | UUCAGACUGGUGAGUAAAGdTdT | 2708 |
| AD-61995.1 | GUCUGAACUUGAAAGAUAUdTdT | 2142 | 3803-3821 | AUAUCUUUCAAGUUCAGACdTdT | 2709 |
| AD-62001.1 | ACUUGAAAGAUAUAAAUUAdTdT | 2143 | 3809-3827 | UAAUUUAUAUCUUUCAAGUdTdT | 2710 |
| AD-62007.1 | UAUAAAUUAUGUUAACCCAdTdT | 2144 | 3819-3837 | UGGGUUAACAUAAUUUAUAdTdT | 2711 |
| AD-62013.1 | GUUAACCCAGUCAUCAAAUdTdT | 2145 | 3829-3847 | AUUUGAUGACUGGGUUAACdTdT | 2712 |
| AD-61972.1 | UCAUCAAAUGGCUAUCAGAdTdT | 2146 | 3839-3857 | UCUGAUAGCCAUUUGAUGAdTdT | 2713 |
| AD-61978.1 | UAUCAGAAGAGCAGAGGUAdTdT | 2147 | 3851-3869 | UACCUCUGCUCUUCUGAUAdTdT | 2714 |
| AD-61984.1 | AGAGGUAUGGAGGUGGCUUdTdT | 2148 | 3863-3881 | AAGCCACCUCCAUACCUCUdTdT | 2715 |
| AD-61990.1 | GAGGUGGCUUUUAUUCAACdTdT | 2149 | 3872-3890 | GUUGAAUAAAAGCCACCUCdTdT | 2716 |
| AD-61996.1 | UAUUCAACCCAGGACACAAdTdT | 2150 | 3883-3901 | UUGUGUCCUGGGUUGAAUAdTdT | 2717 |
| AD-62002.1 | AGGACACAAUCAAUGCCAUdTdT | 2151 | 3893-3911 | AUGGCAUUGAUUGUGUCCUdTdT | 2718 |
| AD-62008.1 | CAAUCAAUGCCAUUGAGGGdTdT | 2152 | 3899-3917 | CCCUCAAUGGCAUUGAUUGdTdT | 2719 |
| AD-62014.1 | CAUUGAGGGCCUGACGGAAdTdT | 2153 | 3909-3927 | UUCCGUCAGGCCCUCAAUGdTdT | 2720 |
| AD-61973.1 | ACGGAAUAUUCACUCCUGGdTdT | 2154 | 3922-3940 | CCAGGAGUGAAUAUUCCGUdTdT | 2721 |
| AD-61979.1 | UUCACUCCUGGUUAAACAAdTdT | 2155 | 3930-3948 | UUGUUUAACCAGGAGUGAAdTdT | 2722 |
| AD-61985.1 | GGUUAAACAACUCCGCUUGdTdT | 2156 | 3939-3957 | CAAGCGGAGUUGUUUAACCdTdT | 2723 |
| AD-61991.1 | CCGCUUGAGUAUGGACAUCdTdT | 2157 | 3951-3969 | GAUGUCCAUACUCAAGCGGdTdT | 2724 |
| AD-61997.1 | GGACAUCGAUGUUUCUUACdTdT | 2158 | 3963-3981 | GUAAGAAACAUCGAUGUCCdTdT | 2725 |
| AD-62003.1 | CGAUGUUUCUUACAAGCAUdTdT | 2159 | 3969-3987 | AUGCUUGUAAGAAACAUCGdTdT | 2726 |
| AD-62009.1 | CAAGCAUAAAGGUGCCUUAdTdT | 2160 | 3981-3999 | UAAGGCACCUUUAUGCUUGdTdT | 2727 |
| AD-62056.1 | GUGCCUUACAUAAUUAUAAdTdT | 2161 | 3992-4010 | UUAUAAUUAUGUAAGGCACdTdT | 2728 |
| AD-62015.1 | ACAUAAUUAUAAAAUGACAdTdT | 2162 | 3999-4017 | UGUCAUUUUAUAAUUAUGUdTdT | 2729 |
| AD-62021.1 | AAAAUGACAGACAAGAAUUdTdT | 2163 | 4009-4027 | AAUUCUUGUCUGUCAUUUUdTdT | 2730 |
| AD-62027.1 | CAAGAAUUUCCUUGGGAGGdTdT | 2164 | 4020-4038 | CCUCCCAAGGAAAUUCUUGdTdT | 2731 |
| AD-62033.1 | CCUUGGGAGGCCAGUAGAGdTdT | 2165 | 4029-4047 | CUCUACUGGCCUCCCAAGGdTdT | 2732 |
| AD-62039.1 | AGUAGAGGUGCUUCUCAAUdTdT | 2166 | 4041-4059 | AUUGAGAAGCACCUCUACUdTdT | 2733 |
| AD-62045.1 | CUUCUCAAUGAUGACCUCAdTdT | 2167 | 4051-4069 | UGAGGUCAUCAUUGAGAAGdTdT | 2734 |
| AD-62051.1 | UGACCUCAUUGUCAGUACAdTdT | 2168 | 4062-4080 | UGUACUGACAAUGAGGUCAdTdT | 2735 |
| AD-62057.1 | GUCAGUACAGGAUUUGGCAdTdT | 2169 | 4072-4090 | UGCCAAAUCCUGUACUGACdTdT | 2736 |
| AD-62016.1 | AGGAUUUGGCAGUGGCUUGdTdT | 2170 | 4080-4098 | CAAGCCACUGCCAAAUCCUdTdT | 2737 |
| AD-62022.1 | UGGCUUGGCUACAGUACAUdTdT | 2171 | 4092-4110 | AUGUACUGUAGCCAAGCCAdTdT | 2738 |
| AD-62028.1 | GCUACAGUACAUGUAACAAdTdT | 2172 | 4099-4117 | UUGUUACAUGUACUGUAGCdTdT | 2739 |
| AD-62034.1 | AACAACUGUAGUUCACAAAdTdT | 2173 | 4113-4131 | UUUGUGAACUACAGUUGUUdTdT | 2740 |
| AD-62040.1 | GUAGUUCACAAAACCAGUAdTdT | 2174 | 4120-4138 | UACUGGUUUUGUGAACUACdTdT | 2741 |
| AD-62046.1 | AAACCAGUACCUCUGAGGAdTdT | 2175 | 4130-4148 | UCCUCAGAGGUACUGGUUUdTdT | 2742 |
| AD-62052.1 | UGAGGAAGUUUGCAGCUUUdTdT | 2176 | 4143-4161 | AAAGCUGCAAACUUCCUCAdTdT | 2743 |
| AD-62058.1 | UGCAGCUUUUAUUUGAAAAdTdT | 2177 | 4153-4171 | UUUUCAAAUAAAAGCUGCAdTdT | 2744 |
| AD-62017.1 | AUUUGAAAAUCGAUACUCAdTdT | 2178 | 4163-4181 | UGAGUAUCGAUUUUCAAAUdTdT | 2745 |
| AD-62023.1 | CGAUACUCAGGAUAUUGAAdTdT | 2179 | 4173-4191 | UUCAAUAUCCUGAGUAUCGdTdT | 2746 |
| AD-62029.1 | GGAUAUUGAAGCAUCCCACdTdT | 2180 | 4182-4200 | GUGGGAUGCUUCAAUAUCCdTdT | 2747 |
| AD-62035.1 | GAAGCAUCCCACUACAGAGdTdT | 2181 | 4189-4207 | CUCUGUAGUGGGAUGCUUCdTdT | 2748 |
| AD-62041.1 | ACUACAGAGGCUACGGAAAdTdT | 2182 | 4199-4217 | UUUCCGUAGCCUCUGUAGUdTdT | 2749 |
| AD-62047.1 | CGGAAACUCUGAUUACAAAdTdT | 2183 | 4212-4230 | UUUGUAAUCAGAGUUUCCGdTdT | 2750 |
| AD-62053.1 | UGAUUACAAACGCAUAGUAdTdT | 2184 | 4221-4239 | UACUAUGCGUUUGUAAUCAdTdT | 2751 |
| AD-62059.1 | GCAUAGUAGCAUGUGCCAGdTdT | 2185 | 4232-4250 | CUGGCACAUGCUACUAUGCdTdT | 2752 |
| AD-62018.1 | GCAUGUGCCAGCUACAAGCdTdT | 2186 | 4240-4258 | GCUUGUAGCUGGCACAUGCdTdT | 2753 |
| AD-62024.1 | CUACAAGCCCAGCAGGGAAdTdT | 2187 | 4251-4269 | UUCCCUGCUGGGCUUGUAGdTdT | 2754 |
| AD-62030.1 | CAGCAGGGAAGAAUCAUCAdTdT | 2188 | 4260-4278 | UGAUGAUUCUUCCCUGCUGdTdT | 2755 |
| AD-62036.1 | GAAUCAUCAUCUGGAUCCUdTdT | 2189 | 4270-4288 | AGGAUCCAGAUGAUGAUUCdTdT | 2756 |
| AD-62042.1 | GAUCCUCUCAUGCGGUGAUdTdT | 2190 | 4283-4301 | AUCACCGCAUGAGAGGAUCdTdT | 2757 |
| AD-62048.1 | CUCAUGCGGUGAUGGACAUdTdT | 2191 | 4289-4307 | AUGUCCAUCACCGCAUGAGdTdT | 2758 |
| AD-62054.1 | GAUGGACAUCUCCUUGCCUdTdT | 2192 | 4299-4317 | AGGCAAGGAGAUGUCCAUCdTdT | 2759 |
| AD-62060.1 | CUUGCCUACUGGAAUCAGUdTdT | 2193 | 4311-4329 | ACUGAUUCCAGUAGGCAAGdTdT | 2760 |
| AD-62019.1 | GAAUCAGUGCAAAUGAAGAdTdT | 2194 | 4322-4340 | UCUUCAUUUGCACUGAUUCdTdT | 2761 |
| AD-62025.1 | AAAUGAAGAAGACUUAAAAdTdT | 2195 | 4332-4350 | UUUUAAGUCUUCUUCAUUUdTdT | 2762 |
| AD-62031.1 | GAAGACUUAAAAGCCCUUGdTdT | 2196 | 4339-4357 | CAAGGGCUUUUAAGUCUUCdTdT | 2763 |
| AD-62037.1 | CCUUGUGGAAGGGGUGGAUdTdT | 2197 | 4353-4371 | AUCCACCCCUUCCACAAGGdTdT | 2764 |
| AD-62043.1 | GAAGGGGUGGAUCAACUAUdTdT | 2198 | 4360-4378 | AUAGUUGAUCCACCCCUUCdTdT | 2765 |
| AD-62049.1 | AUCAACUAUUCACUGAUUAdTdT | 2199 | 4370-4388 | UAAUCAGUGAAUAGUUGAUdTdT | 2766 |
| AD-62055.1 | CACUGAUUACCAAAUCAAAdTdT | 2200 | 4380-4398 | UUUGAUUUGGUAAUCAGUGdTdT | 2767 |
| AD-62061.1 | AUCAAAGAUGGACAUGUUAdTdT | 2201 | 4393-4411 | UAACAUGUCCAUCUUUGAUdTdT | 2768 |
| AD-62020.1 | GGACAUGUUAUUCUGCAACdTdT | 2202 | 4402-4420 | GUUGCAGAAUAACAUGUCCdTdT | 2769 |
| AD-62026.1 | UCUGCAACUGAAUUCGAUUdTdT | 2203 | 4413-4431 | AAUCGAAUUCAGUUGCAGAdTdT | 2770 |
| AD-62032.1 | GAAUUCGAUUCCCUCCAGUdTdT | 2204 | 4422-4440 | ACUGGAGGGAAUCGAAUUCdTdT | 2771 |
| AD-62038.1 | CCCUCCAGUGAUUUCCUUUdTdT | 2205 | 4432-4450 | AAAGGAAAUCACUGGAGGGdTdT | 2772 |
| AD-62044.1 | GAUUUCCUUUGUGUACGAUdTdT | 2206 | 4441-4459 | AUCGUACACAAAGGAAAUCdTdT | 2773 |
| AD-62050.1 | GUACGAUUCCGGAUAUUUGdTdT | 2207 | 4453-4471 | CAAAUAUCCGGAAUCGUACdTdT | 2774 |
| AD-62320.1 | CGGAUAUUUGAACUCUUUGdTdT | 2208 | 4462-4480 | CAAAGAGUUCAAAUAUCCGdTdT | 2775 |
| AD-62326.1 | ACUCUUUGAAGUUGGGUUUdTdT | 2209 | 4473-4491 | AAACCCAACUUCAAAGAGUdTdT | 2776 |
| AD-62332.1 | AGUUGGGUUUCUCAGUCCUdTdT | 2210 | 4482-4500 | AGGACUGAGAAACCCAACUdTdT | 2777 |
| AD-62338.1 | UUCUCAGUCCUGCCACUUUdTdT | 2211 | 4490-4508 | AAAGUGGCAGGACUGAGAAdTdT | 2778 |
| AD-62344.1 | CACUUUCACAGUGUACGAAdTdT | 2212 | 4503-4521 | UUCGUACACUGUGAAAGUGdTdT | 2779 |
| AD-62350.1 | CACAGUGUACGAAUACCACdTdT | 2213 | 4509-4527 | GUGGUAUUCGUACACUGUGdTdT | 2780 |
| AD-62356.1 | ACCACAGACCAGAUAAACAdTdT | 2214 | 4523-4541 | UGUUUAUCUGGUCUGUGGUdTdT | 2781 |
| AD-62362.1 | CCAGAUAAACAGUGUACCAdTdT | 2215 | 4531-4549 | UGGUACACUGUUUAUCUGGdTdT | 2782 |
| AD-62321.1 | CAGUGUACCAUGUUUUAUAdTdT | 2216 | 4540-4558 | UAUAAAACAUGGUACACUGdTdT | 2783 |
| AD-62327.1 | GUUUUAUAGCACUUCCAAUdTdT | 2217 | 4551-4569 | AUUGGAAGUGCUAUAAAACdTdT | 2784 |
| AD-62333.1 | CUUCCAAUAUCAAAAUUCAdTdT | 2218 | 4562-4580 | UGAAUUUUGAUAUUGGAAGdTdT | 2785 |
| AD-62339.1 | AUCAAAAUUCAGAAAGUCUdTdT | 2219 | 4570-4588 | AGACUUUCUGAAUUUUGAUdTdT | 2786 |
| AD-62345.1 | GAAAGUCUGUGAAGGAGCCdTdT | 2220 | 4581-4599 | GGCUCCUUCACAGACUUUCdTdT | 2787 |
| AD-62351.1 | GAAGGAGCCGCGUGCAAGUdTdT | 2221 | 4591-4609 | ACUUGCACGCGGCUCCUUCdTdT | 2788 |
| AD-62357.1 | CGUGCAAGUGUGUAGAAGCdTdT | 2222 | 4601-4619 | GCUUCUACACACUUGCACGdTdT | 2789 |
| AD-62363.1 | GUAGAAGCUGAUUGUGGGCdTdT | 2223 | 4612-4630 | GCCCACAAUCAGCUUCUACdTdT | 2790 |
| AD-62322.1 | CUGAUUGUGGGCAAAUGCAdTdT | 2224 | 4619-4637 | UGCAUUUGCCCACAAUCAGdTdT | 2791 |
| AD-62328.1 | GCAAAUGCAGGAAGAAUUGdTdT | 2225 | 4629-4647 | CAAUUCUUCCUGCAUUUGCdTdT | 2792 |
| AD-62334.1 | GAAGAAUUGGAUCUGACAAdTdT | 2226 | 4639-4657 | UUGUCAGAUCCAAUUCUUCdTdT | 2793 |
| AD-62340.1 | CUGACAAUCUCUGCAGAGAdTdT | 2227 | 4651-4669 | UCUCUGCAGAGAUUGUCAGdTdT | 2794 |
| AD-62346.1 | GCAGAGACAAGAAAACAAAdTdT | 2228 | 4663-4681 | UUUGUUUUCUUGUCUCUGCdTdT | 2795 |
| AD-62352.1 | CAAGAAAACAAACAGCAUGdTdT | 2229 | 4670-4688 | CAUGCUGUUUGUUUUCUUGdTdT | 2796 |
| AD-62358.1 | ACAGCAUGUAAACCAGAGAdTdT | 2230 | 4681-4699 | UCUCUGGUUUACAUGCUGUdTdT | 2797 |
| AD-62364.1 | CCAGAGAUUGCAUAUGCUUdTdT | 2231 | 4693-4711 | AAGCAUAUGCAAUCUCUGGdTdT | 2798 |
| AD-62323.1 | GCAUAUGCUUAUAAAGUUAdTdT | 2232 | 4702-4720 | UAACUUUAUAAGCAUAUGCdTdT | 2799 |
| AD-62329.1 | UUAUAAAGUUAGCAUCACAdTdT | 2233 | 4710-4728 | UGUGAUGCUAACUUUAUAAdTdT | 2800 |
| AD-62335.1 | CAUCACAUCCAUCACUGUAdTdT | 2234 | 4722-4740 | UACAGUGAUGGAUGUGAUGdTdT | 2801 |
| AD-62341.1 | UCACUGUAGAAAAUGUUUUdTdT | 2235 | 4733-4751 | AAAACAUUUUCUACAGUGAdTdT | 2802 |
| AD-62347.1 | AGAAAAUGUUUUUGUCAAGdTdT | 2236 | 4740-4758 | CUUGACAAAAACAUUUUCUdTdT | 2803 |
| AD-62353.1 | UUUGUCAAGUACAAGGCAAdTdT | 2237 | 4750-4768 | UUGCCUUGUACUUGACAAAdTdT | 2804 |
| AD-62359.1 | AGGCAACCCUUCUGGAUAUdTdT | 2238 | 4763-4781 | AUAUCCAGAAGGGUUGCCUdTdT | 2805 |
| AD-62365.1 | CCUUCUGGAUAUCUACAAAdTdT | 2239 | 4770-4788 | UUUGUAGAUAUCCAGAAGGdTdT | 2806 |
| AD-62324.1 | UAUCUACAAAACUGGGGAAdTdT | 2240 | 4779-4797 | UUCCCCAGUUUUGUAGAUAdTdT | 2807 |
| AD-62330.1 | CUGGGGAAGCUGUUGCUGAdTdT | 2241 | 4790-4808 | UCAGCAACAGCUUCCCCAGdTdT | 2808 |
| AD-62336.1 | CUGUUGCUGAGAAAGACUCdTdT | 2242 | 4799-4817 | GAGUCUUUCUCAGCAACAGdTdT | 2809 |
| AD-62342.1 | GACUCUGAGAUUACCUUCAdTdT | 2243 | 4813-4831 | UGAAGGUAAUCUCAGAGUCdTdT | 2810 |
| AD-62348.1 | GAGAUUACCUUCAUUAAAAdTdT | 2244 | 4819-4837 | UUUUAAUGAAGGUAAUCUCdTdT | 2811 |
| AD-62354.1 | AUUAAAAAGGUAACCUGUAdTdT | 2245 | 4831-4849 | UACAGGUUACCUUUUUAAUdTdT | 2812 |
| AD-62360.1 | UAACCUGUACUAACGCUGAdTdT | 2246 | 4841-4859 | UCAGCGUUAGUACAGGUUAdTdT | 2813 |
| AD-62366.1 | CUAACGCUGAGCUGGUAAAdTdT | 2247 | 4850-4868 | UUUACCAGCUCAGCGUUAGdTdT | 2814 |
| AD-62325.1 | GGUAAAAGGAAGACAGUACdTdT | 2248 | 4863-4881 | GUACUGUCUUCCUUUUACCdTdT | 2815 |
| AD-62331.1 | GAAGACAGUACUUAAUUAUdTdT | 2249 | 4871-4889 | AUAAUUAAGUACUGUCUUCdTdT | 2816 |
| AD-62337.1 | CUUAAUUAUGGGUAAAGAAdTdT | 2250 | 4881-4899 | UUCUUUACCCAUAAUUAAGdTdT | 2817 |
| AD-62343.1 | UAAAGAAGCCCUCCAGAUAdTdT | 2251 | 4893-4911 | UAUCUGGAGGGCUUCUUUAdTdT | 2818 |
| AD-62349.1 | CCUCCAGAUAAAAUACAAUdTdT | 2252 | 4902-4920 | AUUGUAUUUUAUCUGGAGGdTdT | 2819 |
| AD-62355.1 | AAAUACAAUUUCAGUUUCAdTdT | 2253 | 4912-4930 | UGAAACUGAAAUUGUAUUUdTdT | 2820 |
| AD-62361.1 | CAGUUUCAGGUACAUCUACdTdT | 2254 | 4923-4941 | GUAGAUGUACCUGAAACUGdTdT | 2821 |
| AD-62367.1 | GGUACAUCUACCCUUUAGAdTdT | 2255 | 4931-4949 | UCUAAAGGGUAGAUGUACCdTdT | 2822 |
| AD-62373.1 | CCUUUAGAUUCCUUGACCUdTdT | 2256 | 4942-4960 | AGGUCAAGGAAUCUAAAGGdTdT | 2823 |
| AD-62379.1 | CCUUGACCUGGAUUGAAUAdTdT | 2257 | 4952-4970 | UAUUCAAUCCAGGUCAAGGdTdT | 2824 |
| AD-62385.1 | GGAUUGAAUACUGGCCUAGdTdT | 2258 | 4961-4979 | CUAGGCCAGUAUUCAAUCCdTdT | 2825 |
| AD-62391.1 | CUGGCCUAGAGACACAACAdTdT | 2259 | 4971-4989 | UGUUGUGUCUCUAGGCCAGdTdT | 2826 |
| AD-62397.1 | GAGACACAACAUGUUCAUCdTdT | 2260 | 4979-4997 | GAUGAACAUGUUGUGUCUCdTdT | 2827 |
| AD-62403.1 | GUUCAUCGUGUCAAGCAUUdTdT | 2261 | 4991-5009 | AAUGCUUGACACGAUGAACdTdT | 2828 |
| AD-62409.1 | GUCAAGCAUUUUUAGCUAAdTdT | 2262 | 5000-5018 | UUAGCUAAAAAUGCUUGACdTdT | 2829 |
| AD-62368.1 | AGCUAAUUUAGAUGAAUUUdTdT | 2263 | 5013-5031 | AAAUUCAUCUAAAUUAGCUdTdT | 2830 |
| AD-62374.1 | AGAUGAAUUUGCCGAAGAUdTdT | 2264 | 5022-5040 | AUCUUCGGCAAAUUCAUCUdTdT | 2831 |
| AD-62380.1 | CCGAAGAUAUCUUUUUAAAdTdT | 2265 | 5033-5051 | UUUAAAAAGAUAUCUUCGGdTdT | 2832 |
| AD-62386.1 | CUUUUUAAAUGGAUGCUAAdTdT | 2266 | 5043-5061 | UUAGCAUCCAUUUAAAAAGdTdT | 2833 |
| AD-62392.1 | GGAUGCUAAAAUUCCUGAAdTdT | 2267 | 5053-5071 | UUCAGGAAUUUUAGCAUCCdTdT | 2834 |
| AD-62398.1 | UAAAAUUCCUGAAGUUCAGdTdT | 2268 | 5059-5077 | CUGAACUUCAGGAAUUUUAdTdT | 2835 |
| AD-62404.1 | AGUUCAGCUGCAUACAGUUdTdT | 2269 | 5071-5089 | AACUGUAUGCAGCUGAACUdTdT | 2836 |
| AD-62410.1 | GCAUACAGUUUGCACUUAUdTdT | 2270 | 5080-5098 | AUAAGUGCAAACUGUAUGCdTdT | 2837 |
| AD-62369.1 | ACUUAUGGACUCCUGUUGUdTdT | 2271 | 5093-5111 | ACAACAGGAGUCCAUAAGUdTdT | 2838 |
| AD-62375.1 | GGACUCCUGUUGUUGAAGUdTdT | 2272 | 5099-5117 | ACUUCAACAACAGGAGUCCdTdT | 2839 |
| AD-62381.1 | UGUUGAAGUUCGUUUUUUUdTdT | 2273 | 5109-5127 | AAAAAAACGAACUUCAACAdTdT | 2840 |
| AD-62387.1 | UUUUUUGUUUUCUUCUUUUdTdT | 2274 | 5122-5140 | AAAAGAAGAAAACAAAAAAdTdT | 2841 |
| AD-62393.1 | UCUUCUUUUUUUAAACAUUdTdT | 2275 | 5132-5150 | AAUGUUUAAAAAAAGAAGAdTdT | 2842 |
| AD-62399.1 | UUUUUAAACAUUCAUAGCUdTdT | 2276 | 5139-5157 | AGCUAUGAAUGUUUAAAAAdTdT | 2843 |
| AD-62405.1 | AUAGCUGGUCUUAUUUGUAdTdT | 2277 | 5152-5170 | UACAAAUAAGACCAGCUAUdTdT | 2844 |
| AD-62411.1 | GUCUUAUUUGUAAAGCUCAdTdT | 2278 | 5159-5177 | UGAGCUUUACAAAUAAGACdTdT | 2845 |
| AD-62370.1 | AAAGCUCACUUUACUUAGAdTdT | 2279 | 5170-5188 | UCUAAGUAAAGUGAGCUUUdTdT | 2846 |
| AD-62376.1 | ACUUAGAAUUAGUGGCACUdTdT | 2280 | 5182-5200 | AGUGCCACUAAUUCUAAGUdTdT | 2847 |
| AD-62382.1 | AGUGGCACUUGCUUUUAUUdTdT | 2281 | 5192-5210 | AAUAAAAGCAAGUGCCACUdTdT | 2848 |
| AD-62388.1 | GCUUUUAUUAGAGAAUGAUdTdT | 2282 | 5202-5220 | AUCAUUCUCUAAUAAAAGCdTdT | 2849 |
| AD-62394.1 | GAGAAUGAUUUCAAAUGCUdTdT | 2283 | 5212-5230 | AGCAUUUGAAAUCAUUCUCdTdT | 2850 |
| AD-62400.1 | UUUCAAAUGCUGUAACUUUdTdT | 2284 | 5220-5238 | AAAGUUACAGCAUUUGAAAdTdT | 2851 |
| AD-62406.1 | GUAACUUUCUGAAAUAACAdTdT | 2285 | 5231-5249 | UGUUAUUUCAGAAAGUUACdTdT | 2852 |
| AD-62412.1 | GAAAUAACAUGGCCUUGGAdTdT | 2286 | 5241-5259 | UCCAAGGCCAUGUUAUUUCdTdT | 2853 |
| AD-62371.1 | CCUUGGAGGGCAUGAAGACdTdT | 2287 | 5253-5271 | GUCUUCAUGCCCUCCAAGGdTdT | 2854 |
| AD-62377.1 | AGGGCAUGAAGACAGAUACdTdT | 2288 | 5259-5277 | GUAUCUGUCUUCAUGCCCUdTdT | 2855 |
| AD-62383.1 | GAUACUCCUCCAAGGUUAUdTdT | 2289 | 5273-5291 | AUAACCUUGGAGGAGUAUCdTdT | 2856 |
| AD-62389.1 | CCUCCAAGGUUAUUGGACAdTdT | 2290 | 5279-5297 | UGUCCAAUAACCUUGGAGGdTdT | 2857 |
| AD-62395.1 | GGACACCGGAAACAAUAAAdTdT | 2291 | 5293-5311 | UUUAUUGUUUCCGGUGUCCdTdT | 2858 |
| AD-62401.1 | GAAACAAUAAAUUGGAACAdTdT | 2292 | 5301-5319 | UGUUCCAAUUUAUUGUUUCdTdT | 2859 |
| AD-62407.1 | AUUGGAACACCUCCUCAAAdTdT | 2293 | 5311-5329 | UUUGAGGAGGUGUUCCAAUdTdT | 2860 |
| AD-62413.1 | UCCUCAAACCUACCACUCAdTdT | 2294 | 5322-5340 | UGAGUGGUAGGUUUGAGGAdTdT | 2861 |
| AD-62372.1 | CUACCACUCAGGAAUGUUUdTdT | 2295 | 5331-5349 | AAACAUUCCUGAGUGGUAGdTdT | 2862 |
| AD-62378.1 | AAUGUUUGCUGGGGCCGAAdTdT | 2296 | 5343-5361 | UUCGGCCCCAGCAAACAUUdTdT | 2863 |
| AD-62384.1 | UGCUGGGGCCGAAAGAACAdTdT | 2297 | 5349-5367 | UGUUCUUUCGGCCCCAGCAdTdT | 2864 |
| AD-62390.1 | AAAGAACAGUCCAUUGAAAdTdT | 2298 | 5360-5378 | UUUCAAUGGACUGUUCUUUdTdT | 2865 |
| AD-62396.1 | CAUUGAAAGGGAGUAUUACdTdT | 2299 | 5371-5389 | GUAAUACUCCCUUUCAAUGdTdT | 2866 |
| AD-62402.1 | GGAGUAUUACAAAAACAUGdTdT | 2300 | 5380-5398 | CAUGUUUUUGUAAUACUCCdTdT | 2867 |
| AD-62408.1 | AAAACAUGGCCUUUGCUUGdTdT | 2301 | 5391-5409 | CAAGCAAAGGCCAUGUUUUdTdT | 2868 |
| AD-62414.1 | GCCUUUGCUUGAAAGAAAAdTdT | 2302 | 5399-5417 | UUUUCUUUCAAGCAAAGGCdTdT | 2869 |
| AD-62415.1 | GAAAGAAAAUACCAAGGAAdTdT | 2303 | 5409-5427 | UUCCUUGGUAUUUUCUUUCdTdT | 2870 |
| AD-62416.1 | CCAAGGAACAGGAAACUGAdTdT | 2304 | 5420-5438 | UCAGUUUCCUGUUCCUUGGdTdT | 2871 |
| AD-62417.1 | AACUGAUCAUUAAAGCCUGdTdT | 2305 | 5433-5451 | CAGGCUUUAAUGAUCAGUUdTdT | 2872 |

TABLE 22
C5 single dose screen (10 mM) in Hep3B cells with dT modified iRNAs

| Duplex ID | Avg. % message remaining |
|---|---|
| AD-61779.2 | 43.2 |
| AD-61785.2 | 22.5 |
| AD-61791.2 | 27.3 |
| AD-61797.2 | 30.5 |
| AD-61803.2 | 30.9 |
| AD-61809.2 | 75.1 |
| AD-61815.2 | 90.7 |
| AD-61821.2 | 33.7 |
| AD-61780.2 | 53.5 |
| AD-61786.2 | 34.4 |
| AD-61792.2 | 27.5 |
| AD-61798.2 | 23.3 |
| AD-61804.2 | 23.6 |
| AD-61810.2 | 33.4 |
| AD-61816.2 | 39.7 |
| AD-61822.2 | 24.9 |
| AD-61781.2 | 31.2 |
| AD-61787.2 | 22.8 |
| AD-61793.2 | 28.4 |
| AD-61799.2 | 91 |
| AD-61805.2 | 22.1 |
| AD-61811.2 | 90.9 |
| AD-61817.2 | 26.1 |
| AD-61823.2 | 41.3 |
| AD-61782.2 | 42.5 |
| AD-61788.2 | 28.9 |
| AD-61794.2 | 133.5 |
| AD-61800.2 | 27.9 |
| AD-61806.2 | 42.8 |
| AD-61812.2 | 26.9 |
| AD-61818.2 | 30.6 |
| AD-61824.2 | 29.3 |
| AD-61783.2 | 61.3 |
| AD-61789.2 | 25.5 |
| AD-61795.2 | 34.2 |
| AD-61801.2 | 24.2 |
| AD-61807.2 | 42.8 |
| AD-61813.2 | 31 |
| AD-61819.2 | 42.2 |
| AD-61825.2 | 31 |
| AD-61784.2 | 34.1 |
| AD-61790.2 | 26.8 |
| AD-61796.2 | 34.6 |
| AD-61802.2 | 30 |
| AD-61808.2 | 23.5 |
| AD-61814.2 | 45.3 |
| AD-61820.2 | 56 |
| AD-61826.2 | 31.6 |
| AD-61832.2 | 36.2 |
| AD-61838.2 | 39.7 |
| AD-61844.2 | 37 |
| AD-61850.2 | 66.3 |
| AD-61856.2 | 172.6 |
| AD-61862.2 | 41.3 |
| AD-61868.2 | 32.2 |
| AD-61827.2 | 52.7 |
| AD-61833.2 | 29.6 |
| AD-61839.2 | 41.5 |
| AD-61845.2 | 29.7 |
| AD-61851.2 | 37 |
| AD-61857.2 | 34.9 |
| AD-61863.2 | 33.3 |
| AD-61869.2 | 38.2 |
| AD-61828.2 | 30.3 |
| AD-61834.2 | 27.1 |
| AD-61840.2 | 64.3 |
| AD-61846.2 | 42 |
| AD-61852.2 | 25.2 |
| AD-61858.2 | 96.7 |
| AD-61864.2 | 29.6 |
| AD-61870.2 | 30.5 |
| AD-61829.2 | 92.7 |
| AD-61835.2 | 24.8 |
| AD-61841.2 | 59.2 |
| AD-61847.2 | 30.9 |
| AD-61853.2 | 35.2 |
| AD-61859.2 | 40.1 |
| AD-61865.2 | 42.3 |
| AD-61871.2 | 55.8 |
| AD-61830.2 | 162.9 |
| AD-61836.2 | 28.8 |
| AD-61842.2 | 18.2 |
| AD-61848.2 | 25 |
| AD-61854.2 | 42.3 |
| AD-61860.2 | 41.7 |
| AD-61866.2 | 28.9 |
| AD-61872.2 | 64.7 |
| AD-61831.2 | 16.9 |
| AD-61837.2 | 24.9 |
| AD-61843.2 | 27.5 |
| AD-61849.2 | 25.8 |
| AD-61855.2 | 20 |
| AD-61861.2 | 28.6 |
| AD-61867.2 | 18 |
| AD-62062.1 | 22 |
| AD-62068.1 | 29.9 |
| AD-62074.1 | 40.2 |
| AD-62080.1 | 30.4 |
| AD-62086.1 | 21 |
| AD-62092.1 | 20 |
| AD-62098.1 | 38.4 |
| AD-62104.1 | 42.7 |
| AD-62063.1 | 26.6 |
| AD-62069.1 | 55.6 |
| AD-62075.1 | 114.4 |
| AD-62081.1 | 21.2 |
| AD-62087.1 | 33.8 |
| AD-62093.1 | 26.3 |
| AD-62099.1 | 23.9 |
| AD-62105.1 | 30.1 |
| AD-62064.1 | 32 |
| AD-62070.1 | 135.7 |
| AD-62076.1 | 84.3 |
| AD-62082.1 | 42.3 |
| AD-62088.1 | 36.5 |
| AD-62094.1 | 66 |
| AD-62100.1 | 66.4 |
| AD-62106.1 | 33.9 |
| AD-62065.1 | 33 |
| AD-62071.1 | 38.4 |
| AD-62077.1 | 27.8 |
| AD-62083.1 | 44.7 |
| AD-62089.1 | 42.7 |
| AD-62095.1 | 46.6 |
| AD-62101.1 | 35.3 |
| AD-62107.1 | 29.9 |
| AD-62066.1 | 33.5 |
| AD-62072.1 | 27.5 |
| AD-62078.1 | 49.9 |
| AD-62084.1 | 117.6 |
| AD-62090.1 | 44 |
| AD-62096.1 | 33.5 |
| AD-62102.1 | 39.2 |
| AD-62108.1 | 69.5 |
| AD-62067.1 | 32.3 |
| AD-62073.1 | 81.1 |
| AD-62079.1 | 46.8 |
| AD-62085.1 | 31.6 |
| AD-62091.1 | 32 |
| AD-62097.1 | 35.3 |
| AD-62103.1 | 35.6 |
| AD-62109.1 | 24.7 |
| AD-62115.1 | 25.7 |
| AD-62121.1 | 23.1 |
| AD-62127.1 | 36.3 |
| AD-62133.1 | 50.9 |
| AD-62139.1 | 84.1 |
| AD-62145.1 | 90.8 |
| AD-62151.1 | 56.9 |
| AD-62110.1 | 26 |
| AD-62116.1 | 145.5 |
| AD-62122.1 | 198.7 |
| AD-62128.1 | 178.4 |
| AD-62134.1 | 52.4 |
| AD-62140.1 | 55.6 |
| AD-62146.1 | 47.2 |
| AD-62152.1 | 16.4 |
| AD-62111.1 | 49.3 |
| AD-62117.1 | 46.2 |
| AD-62123.1 | 95.1 |
| AD-62129.1 | 156.2 |
| AD-62135.1 | 62 |
| AD-62141.1 | 128.1 |
| AD-62147.1 | 146.2 |
| AD-62153.1 | 35.5 |
| AD-62112.1 | 43 |
| AD-62118.1 | 32 |
| AD-62124.1 | 48.4 |
| AD-62130.1 | 49.4 |
| AD-62136.1 | 141.9 |
| AD-62142.1 | 38.7 |
| AD-62148.1 | 165.2 |
| AD-62154.1 | 94.7 |
| AD-62113.1 | 52.5 |
| AD-62119.1 | 44 |
| AD-62125.1 | 129.9 |
| AD-62131.1 | 68.9 |
| AD-62137.1 | 106 |
| AD-62143.1 | 176.1 |
| AD-62149.1 | 201.3 |
| AD-62155.1 | 143.3 |
| AD-62114.1 | 22.8 |
| AD-62120.1 | 34.6 |
| AD-62126.1 | 44.6 |
| AD-62132.1 | 39.5 |
| AD-62138.1 | 34.5 |
| AD-62144.1 | 28 |
| AD-62150.1 | 22.1 |
| AD-62156.1 | 44.1 |
| AD-62162.1 | 19.8 |
| AD-62168.1 | 17.3 |
| AD-62174.1 | 27 |
| AD-62180.1 | 15.8 |
| AD-62186.1 | 20.5 |
| AD-62192.1 | 33.9 |
| AD-62198.1 | 14 |
| AD-62157.1 | 19.3 |
| AD-62163.1 | 15.4 |
| AD-62169.1 | 23.6 |
| AD-62175.1 | 29.6 |
| AD-62181.1 | 26.4 |
| AD-62187.1 | 28.8 |
| AD-62193.1 | 22.9 |
| AD-62199.1 | 16.4 |
| AD-62158.1 | 18.5 |
| AD-62164.1 | 19.1 |
| AD-62170.1 | 15 |
| AD-62176.1 | 62.7 |
| AD-62182.1 | 70.8 |
| AD-62188.1 | 81.1 |
| AD-62194.1 | 63.6 |
| AD-62200.1 | 21.6 |
| AD-62159.1 | 42.8 |
| AD-62165.1 | 27.7 |
| AD-62171.1 | 31.9 |
| AD-62177.1 | 29.6 |
| AD-62183.1 | 25.2 |
| AD-62189.1 | 32.7 |
| AD-62195.1 | 73.1 |
| AD-62201.1 | 35.6 |
| AD-62160.1 | 56.5 |
| AD-62166.1 | 115.1 |
| AD-62172.1 | 107.4 |
| AD-62178.1 | 71.3 |
| AD-62184.1 | 27.2 |
| AD-62190.1 | 37.2 |
| AD-62196.1 | 19.5 |
| AD-62202.1 | 19.4 |
| AD-62161.1 | 23.7 |
| AD-62167.1 | 24.4 |
| AD-62173.1 | 36 |
| AD-62179.1 | 50.5 |
| AD-62185.1 | 40.5 |
| AD-62191.1 | 39.3 |
| AD-62197.1 | 39.4 |
| AD-62203.1 | 34.1 |
| AD-62209.1 | 34.6 |
| AD-62215.1 | 31 |
| AD-62221.1 | 16.3 |
| AD-62227.1 | 68.5 |
| AD-62233.1 | 34.3 |
| AD-62239.1 | 37.2 |
| AD-62245.1 | 31.2 |
| AD-62204.1 | 33 |
| AD-62210.1 | 29 |
| AD-62216.1 | 38.7 |
| AD-62222.1 | 34.5 |
| AD-62228.1 | 30.3 |
| AD-62234.1 | 15.2 |
| AD-62240.1 | 26.2 |
| AD-62246.1 | 40.4 |
| AD-62205.1 | 17.1 |
| AD-62211.1 | 20.9 |
| AD-62217.1 | 49.8 |
| AD-62223.1 | 40 |
| AD-62229.1 | 26.7 |
| AD-62235.1 | 21.5 |
| AD-62241.1 | 46.2 |
| AD-62247.1 | 40.4 |
| AD-62206.1 | 42.2 |
| AD-62212.1 | 51.7 |
| AD-62218.1 | 26 |
| AD-62224.1 | 40.3 |
| AD-62230.1 | 32.8 |
| AD-62236.1 | 52.4 |
| AD-62242.1 | 33.1 |
| AD-62248.1 | 18 |
| AD-62207.1 | 19.7 |
| AD-62213.1 | 43.4 |
| AD-62219.1 | 39.8 |
| AD-62225.1 | 34.3 |
| AD-62231.1 | 37.2 |
| AD-62237.1 | 25.9 |
| AD-62243.1 | 19.8 |
| AD-62249.1 | 13.8 |
| AD-62208.1 | 13.7 |
| AD-62214.1 | 16.6 |
| AD-62220.1 | 25.2 |
| AD-62226.1 | 27 |
| AD-62232.1 | 36.5 |
| AD-62238.1 | 51.5 |
| AD-62244.1 | 31.5 |
| AD-61874.1 | 27.1 |
| AD-61880.1 | 30.8 |
| AD-61886.1 | 30.4 |
| AD-61892.1 | 48.9 |
| AD-61898.1 | 24.7 |
| AD-61904.1 | 125.9 |
| AD-61910.1 | 45.7 |
| AD-61916.1 | 25.7 |
| AD-61875.1 | 33.4 |
| AD-61881.1 | 64 |
| AD-61887.1 | 36.7 |
| AD-61893.1 | 22.9 |
| AD-61899.1 | 84.5 |
| AD-61905.1 | 32.1 |
| AD-61911.1 | 23.7 |
| AD-61917.1 | 22.1 |
| AD-61876.1 | 47.3 |
| AD-61882.1 | 26.5 |
| AD-61888.1 | 27.7 |
| AD-61894.1 | 64.8 |
| AD-61900.1 | 89.8 |
| AD-61906.1 | 22.4 |
| AD-61912.1 | 19.8 |
| AD-61918.1 | 37.1 |
| AD-61877.1 | 145 |
| AD-61883.1 | 31.5 |
| AD-61889.1 | 33.9 |
| AD-61895.1 | 37.5 |
| AD-61901.1 | 26.1 |
| AD-61907.1 | 33 |
| AD-61913.1 | 33.1 |
| AD-61919.1 | 36.6 |
| AD-61878.1 | 26.9 |
| AD-61884.1 | 33.9 |
| AD-61890.1 | 37.2 |
| AD-61896.1 | 41.7 |
| AD-61902.1 | 58.6 |
| AD-61908.1 | 28 |
| AD-61914.1 | 31.4 |
| AD-61920.1 | 27.1 |
| AD-61879.1 | 33.1 |
| AD-61885.1 | 33.7 |
| AD-61891.1 | 41.3 |
| AD-61897.1 | 39.4 |
| AD-61903.1 | 51.5 |
| AD-61909.1 | 48.6 |
| AD-61915.1 | 122.4 |
| AD-61921.1 | 66.4 |
| AD-61927.1 | 40.5 |
| AD-61933.1 | 27.7 |
| AD-61939.1 | 28.1 |
| AD-61945.1 | 30 |
| AD-61951.1 | 33.7 |
| AD-61957.1 | 32.6 |
| AD-61963.1 | 17 |
| AD-61922.1 | 32.9 |
| AD-61928.1 | 28.3 |
| AD-61934.1 | 24 |
| AD-61940.1 | 28.2 |
| AD-61946.1 | 33.2 |
| AD-61952.1 | 167.9 |
| AD-61958.1 | 37 |
| AD-61964.1 | 30.6 |
| AD-61923.1 | 51.2 |
| AD-61929.1 | 29.4 |
| AD-61935.1 | 61 |
| AD-61941.1 | 29.5 |
| AD-61947.1 | 28.9 |
| AD-61953.1 | 23.7 |
| AD-61959.1 | 18.9 |
| AD-61965.1 | 17 |
| AD-61924.1 | 24.1 |
| AD-61930.1 | 31.9 |
| AD-61936.1 | 36.9 |
| AD-61942.1 | 13.8 |
| AD-61948.1 | 40.2 |
| AD-61954.1 | 41.8 |
| AD-61960.1 | 24.1 |
| AD-61966.1 | 18.9 |
| AD-61925.1 | 52.4 |
| AD-61931.1 | 25.8 |
| AD-61937.1 | 19.1 |
| AD-61943.1 | 27.8 |
| AD-61949.1 | 26.5 |
| AD-61955.1 | 83.8 |
| AD-61961.1 | 26 |
| AD-61967.1 | 16.3 |
| AD-61926.1 | 17.8 |
| AD-61932.1 | 18.6 |
| AD-61938.1 | 31.9 |
| AD-61944.1 | 29.5 |
| AD-61950.1 | 57.8 |
| AD-61956.1 | 42.1 |
| AD-61962.1 | 30 |
| AD-61968.1 | 29.1 |
| AD-61974.1 | 50.8 |
| AD-61980.1 | 19.7 |
| AD-61986.1 | 36.4 |
| AD-61992.1 | 36.3 |
| AD-61998.1 | 18.3 |
| AD-62004.1 | 14 |
| AD-62010.1 | 56.8 |
| AD-61969.1 | 30 |
| AD-61975.1 | 51.1 |
| AD-61981.1 | 37.6 |
| AD-61987.1 | 32.5 |
| AD-61993.1 | 23.4 |
| AD-61999.1 | 43.8 |
| AD-62005.1 | 23.8 |
| AD-62011.1 | 32.7 |
| AD-61970.1 | 39.6 |
| AD-61976.1 | 27.5 |
| AD-61982.1 | 64.9 |
| AD-61988.1 | 29.5 |
| AD-61994.1 | 40.5 |
| AD-62006.1 | 42.1 |
| AD-62012.1 | 21 |
| AD-61971.1 | 27.1 |
| AD-61977.1 | 23.4 |
| AD-61983.1 | 57.5 |
| AD-61989.1 | 25.8 |
| AD-61995.1 | 18.2 |
| AD-62001.1 | 29.7 |
| AD-62007.1 | 106.4 |
| AD-62013.1 | 36.1 |
| AD-61972.1 | 40.5 |
| AD-61978.1 | 49.1 |
| AD-61984.1 | 24.3 |
| AD-61990.1 | 38.8 |
| AD-61996.1 | 40.5 |
| AD-62002.1 | 32.5 |
| AD-62008.1 | 35.3 |
| AD-62014.1 | 23.6 |
| AD-61973.1 | 39.3 |
| AD-61979.1 | 27.4 |
| AD-61985.1 | 31.3 |
| AD-61991.1 | 34.9 |
| AD-61997.1 | 29.2 |
| AD-62003.1 | 25.9 |
| AD-62009.1 | 21.1 |
| AD-62056.1 | 16.3 |
| AD-62015.1 | 139.3 |
| AD-62021.1 | 36.4 |
| AD-62027.1 | 42.4 |
| AD-62033.1 | 62 |
| AD-62039.1 | 35.2 |
| AD-62045.1 | 30.8 |
| AD-62051.1 | 22.9 |
| AD-62057.1 | 31.8 |
| AD-62016.1 | 29.2 |
| AD-62022.1 | 36.9 |
| AD-62028.1 | 52.6 |
| AD-62034.1 | 31 |
| AD-62040.1 | 30.7 |
| AD-62046.1 | 28.2 |
| AD-62052.1 | 23.7 |
| AD-62058.1 | 77.9 |
| AD-62017.1 | 41 |
| AD-62023.1 | 27 |
| AD-62029.1 | 31.8 |
| AD-62035.1 | 46.4 |
| AD-62041.1 | 25.3 |
| AD-62047.1 | 20 |
| AD-62053.1 | 37.1 |
| AD-62059.1 | 31 |
| AD-62018.1 | 37.8 |
| AD-62024.1 | 34.7 |
| AD-62030.1 | 50.4 |
| AD-62036.1 | 25.5 |
| AD-62042.1 | 32.5 |
| AD-62048.1 | 28.3 |
| AD-62054.1 | 55.6 |
| AD-62060.1 | 26.9 |
| AD-62019.1 | 29 |
| AD-62025.1 | 78.5 |
| AD-62031.1 | 152.8 |
| AD-62037.1 | 27.3 |
| AD-62043.1 | 33.8 |
| AD-62049.1 | 46 |
| AD-62055.1 | 24.5 |
| AD-62061.1 | 30.5 |
| AD-62020.1 | 25.1 |
| AD-62026.1 | 24.9 |
| AD-62032.1 | 23 |
| AD-62038.1 | 21.2 |
| AD-62044.1 | 34.1 |
| AD-62050.1 | 22.4 |
| AD-62320.1 | 16.6 |
| AD-62326.1 | 16.6 |
| AD-62332.1 | 15.4 |
| AD-62338.1 | 41.9 |
| AD-62344.1 | 19.6 |
| AD-62350.1 | 32.3 |
| AD-62356.1 | 20.4 |
| AD-62362.1 | 27.8 |
| AD-62321.1 | 18.7 |
| AD-62327.1 | 14.8 |
| AD-62333.1 | 22.2 |
| AD-62339.1 | 134.5 |
| AD-62345.1 | 32.1 |
| AD-62351.1 | 35.6 |
| AD-62357.1 | 31 |
| AD-62363.1 | 28.2 |
| AD-62322.1 | 45.1 |
| AD-62328.1 | 30.1 |
| AD-62334.1 | 39.1 |
| AD-62340.1 | 24.3 |
| AD-62346.1 | 35.4 |
| AD-62352.1 | 33.8 |
| AD-62358.1 | 45.7 |
| AD-62364.1 | 19.7 |
| AD-62323.1 | 40.5 |
| AD-62329.1 | 57.5 |
| AD-62335.1 | 27.6 |
| AD-62341.1 | 69.2 |
| AD-62347.1 | 125.9 |
| AD-62353.1 | 53.1 |
| AD-62359.1 | 38.1 |
| AD-62365.1 | 23.6 |
| AD-62324.1 | 27.1 |
| AD-62330.1 | 25.1 |
| AD-62336.1 | 25.3 |
| AD-62342.1 | 45.4 |
| AD-62348.1 | 91.6 |
| AD-62354.1 | 132.1 |
| AD-62360.1 | 31.6 |
| AD-62366.1 | 14.2 |
| AD-62325.1 | 27.9 |
| AD-62331.1 | 31.5 |
| AD-62337.1 | 33.9 |
| AD-62343.1 | 36.1 |
| AD-62349.1 | 37.6 |
| AD-62355.1 | 38.8 |
| AD-62361.1 | 46.1 |
| AD-62367.1 | 23.6 |
| AD-62373.1 | 32.1 |
| AD-62379.1 | 29.6 |
| AD-62385.1 | 35.7 |
| AD-62391.1 | 33.7 |
| AD-62397.1 | 54.1 |
| AD-62403.1 | 34.8 |
| AD-62409.1 | 28.2 |
| AD-62368.1 | 29.7 |
| AD-62374.1 | 29.6 |
| AD-62380.1 | 30.6 |
| AD-62386.1 | 23.4 |
| AD-62392.1 | 30.5 |
| AD-62398.1 | 48.7 |
| AD-62404.1 | 24.8 |
| AD-62410.1 | 21.9 |
| AD-62369.1 | 27.4 |
| AD-62375.1 | 31.9 |
| AD-62381.1 | 27.3 |
| AD-62387.1 | 77 |
| AD-62393.1 | 93.3 |
| AD-62399.1 | 150.2 |
| AD-62405.1 | 28.5 |
| AD-62411.1 | 19.4 |
| AD-62370.1 | 16.3 |
| AD-62376.1 | 48.2 |
| AD-62382.1 | 28.5 |
| AD-62388.1 | 49.9 |
| AD-62394.1 | 29.9 |
| AD-62400.1 | 45.2 |
| AD-62406.1 | 23 |
| AD-62412.1 | 45.5 |
| AD-62371.1 | 66.5 |
| AD-62377.1 | 49.5 |
| AD-62383.1 | 73.8 |
| AD-62389.1 | 82.4 |
| AD-62395.1 | 31.8 |
| AD-62401.1 | 31.2 |
| AD-62407.1 | 30.2 |
| AD-62413.1 | 28.1 |
| AD-62372.1 | 43 |
| AD-62378.1 | 17.9 |
| AD-62384.1 | 29.6 |
| AD-62390.1 | 37.7 |
| AD-62396.1 | 26 |
| AD-62402.1 | 31.6 |
| AD-62408.1 | 46.6 |
| AD-62414.1 | 27.2 |
| AD-62415.1 | 17.6 |
| AD-62416.1 | 25.3 |
| AD-62417.1 | 36.3 |
| AD-61779.2 | 43.2 |
| AD-61785.2 | 22.5 |
| AD-61791.2 | 27.3 |
| AD-61797.2 | 30.5 |
| AD-61803.2 | 30.9 |
| AD-61809.2 | 75.1 |
| AD-61815.2 | 90.7 |
| AD-61821.2 | 33.7 |
| AD-61780.2 | 53.5 |
| AD-61786.2 | 34.4 |
| AD-61792.2 | 27.5 |
| AD-61798.2 | 23.3 |
| AD-61804.2 | 23.6 |

### Example 7: In Vivo Screening of Additional siRNAs

[0905] Based on the sequence of AD-58643, an additional four sense and three antisense sequences were synthesized and used to prepare twelve, 21/25 mer compounds (Table 23). In general, the antisense strands of these compounds were extended with a dTdT and the duplexes had fewer fluoro-modified nucleotides.

[0906] C57BL/6 mice (N=3 per group) were injected subcutaneously with 1 mg/kg of these GalNAc conjugated duplexes, serum was collected on day 0 pre-bleed, and day 5, and the levels of C5 proteins were quantified by ELISA. C5 protein levels were normalized to the day 0 pre-bleed level.

[0907] FIG. 14 shows the results of an in vivo single dose screen with the indicated iRNAs. Data are expressed as percent of C5 protein remaining relative to pre-bleed levels. Those iRNAs having improved efficacy as compared to the parent compound included AD-62510, AD-62643, AD-62645, AD-62646, AD-62650, and AD-62651. These iRNAs also demonstrated similar potencies (IC₅₀ of about 23-59 pM).

[0908] The efficacy of these iRNAs was also tested in C57Bl/6 mice using a single-dosing administration protocol. Mice were subcutaneously administered AD-62510, AD-62643, AD-62645, AD-62646, AD-62650, and AD-62651 at a 0.25 mg/kg, 0.5 mg/kg, 1.0 mg/kg, or 2.5 mg/kg dose. Serum was collected at days 0 and 5 and analyzed for C5 protein levels by ELISA. C5 levels were normalized to the day 0 pre-bleed level.

[0909] FIG. 15 shows that there is a dose response with all of the tested iRNAs and that single-dosing of all of these iRNAs achieved silencing of C5 protein similar to or better than AD-58641.

[0910] The duration of silencing of AD-62510, AD-62643, AD-62645, AD-62646, AD-62650, and AD-62651 in vivo was determined by administering a single 1.0 mg/kg dose to C57Bl/6 mice and determining the amount of C5 protein present on days 6, 13, 20, 27, and 34 by ELISA. C5 levels were normalized to the day 0 pre-bleed level.

[0911] As demonstrated in FIG. 16, each of the iRNAs tested has the same recovery kinetics as AD-62643 trending toward the best silencing, but within the error of the assay.

[0912] AD-62510, AD-62643, AD-62645, AD-62646, AD-62650, and AD-62651 were further tested for efficacy and to evaluate the cumulative effect of the iRNAs in rats using a repeat administration protocol. Wild-type Sprague Dawley rats were subcutaneously injected with each of the iRNAs at a 5.0 mg/kg/dose on days 0, 4, and 7. Serum was collected on days 0, 4, 7, 11, 14, 18, 25, 28, and 32. Serum hemolytic activity was quantified as described above.

[0913] The results depicted in FIG. 17 demonstrate that all of the tested iRNAs have a potent and durable decrease in hemolytic activity and a similar recovery of hemolysis to that observed with AD-58641 treatment.

TABLE 23
Modified Sense and Antisense Strand Sequences of GalNAc-Conjugated C5 dsRNAs.

| | | | SEQ ID | |
|---|---|---|---|---|
| Duplex ID | sense ID | Sense (5′ to 3′) | NO: | AS ID |
| AD-58643 | A-119326.1 | AfsasGfcAfaGfaUfAfUfuUfuUfaUfaAfuAfL96 | 2873 | A-119327.1 |
| AD-62642 | A-125167.7 | asasGfcAfaGfaUfAfUfuUfuuAfuAfauaL96 | 2874 | A-125139.1 |
| AD-62510 | A-125167.7 | asasGfcAfaGfaUfAfUfuUfuuAfuAfauaL96 | 2875 | A-125173.2 |
| AD-62643 | A-125167.7 | asasGfcAfaGfaUfAfUfuUfuuAfuAfauaL96 | 2876 | A-125647.1 |
| AD-62644 | A-125157.17 | asasGfcAfaGfaUfAfUfuUfuuAfuaAfuaL96 | 2877 | A-125139.1 |
| AD-62645 | A-125157.17 | asasGfcAfaGfaUfAfUfuUfuuAfuaAfuaL96 | 2878 | A-125173.2 |
| AD-62646 | A-125157.17 | asasGfcAfaGfaUfAfUfuUfuuAfuaAfuaL96 | 2879 | A-125647.1 |
| AD-62647 | A-125134.1 | asasgcaagauaUfuuuua(Tgn)aauaL96 | 2880 | A-125139.1 |
| AD-62648 | A-125134.1 | asasgcaagauaUfuuuua(Tgn)aauaL96 | 2881 | A-125173.2 |
| AD-62649 | A-125134.1 | asasgcaagauaUfuuuua(Tgn)aauaL96 | 2882 | A-125647.1 |
| AD-62428 | A-125127.2 | asasgcaagaUfaUfuuuuauaauaL96 | 2883 | A-125139.1 |
| AD-62650 | A-125127.2 | asasgcaagaUfaUfuuuuauaauaL96 | 2884 | A-125173.2 |
| AD-62651 | A-125127.2 | asasgcaagaUfaUfuuuuauaauaL96 | 2885 | A-125647.1 |

| | | SEQ ID |
|---|---|---|
| Duplex ID | Antisense (5′ to 3′) | NO: |
| AD-58643 | usAfsuUfaUfaAfaAfauaUfcUfuGfcUfususu | 2886 |
| AD-62642 | usAfsuuaUfaAfaAfauaUfcUfuGfcuususudTdT | 2887 |
| AD-62510 | usAfsUfuAfuAfAfaAfauaUfcUfuGfcuususudTdT | 2888 |
| AD-62643 | usAfsUfuAfuaAfaAfauaUfcUfuGfcuususudTdT | 2889 |
| AD-62644 | usAfsuuaUfaAfaAfauaUfcUfuGfcuususudTdT | 2890 |
| AD-62645 | usAfsUfuAfuAfAfaAfauaUfcUfuGfcuususudTdT | 2891 |
| AD-62646 | usAfsUfuAfuaAfaAfauaUfcUfuGfcuususudTdT | 2892 |
| AD-62647 | usAfsuuaUfaAfaAfauaUfcUfuGfcuususudTdT | 2893 |
| AD-62648 | usAfsUfuAfuAfAfaAfauaUfcUfuGfcuususudTdT | 2894 |
| AD-62649 | usAfsUfuAfuaAfaAfauaUfcUfuGfcuususudTdT | 2895 |
| AD-62428 | usAfsuuaUfaAfaAfauaUfcUfuGfcuususudTdT | 2896 |
| AD-62650 | usAfsUfuAfuAfAfaAfauaUfcUfuGfcuususudTdT | 2897 |
| AD-62651 | usAfsUfuAfuaAfaAfauaUfcUfuGfcuususudTdT | 2898 |

### Example 8: Sustained C5 Protein Knockdown in Non-Human Primates

[0914] AD-62643 was tested for its ability to decrease the serum levels of C5 protein after long-term treatment. Cynomolgus macaques (N=3 per group) were administered AD-62643 via subcutaneous injection using two dosing regimens. In the first dosing regimen (Q2W), AD-62643 was administered every week for 8 weeks at a dose of 5 mg/kg, followed by administration every 2 weeks at a dose of 5 mg/kg thereafter (5 mg/kg, qw×8, q2w thereafter). In the second dosing regimen (QM), AD-62643 was administered every day at a dose of 5 mg/kg for 5 days, followed by administration every week for 8 weeks at a dose of 5 mg/kg, followed by a monthly administration of a dose of 10 mg/kg thereafter (5 mg/kg, qd×5, qw×8/10 mg/kg qm thereafter). The levels of C5 protein were quantified by ELISA, and C5 protein levels were normalized to the day 0 pre-bleed level. Serum hemolytic activity was analyzed using a sensitized sheep erythrocyte assay to measure classical pathway activity. The percent hemolysis was calculated relative to maximal hemolysis and to background hemolysis in control samples. The alternative complement pathway (CAP) activity was also measured.

[0915] FIG. 19A shows the average % serum C5 levels relative to the pre-bleed levels for the two tested dosing regimens. FIG. 19B shows the % serum C5 levels relative to the pre-bleed levels for each individual animal tested. The data demonstrates that both dosing regimens are able to achieve and maintain, on average, up to ˜99% (98.2±0.8%) knockdown of serum C5, with low inter-animal variation.

[0916] FIG. 20A shows % hemolysis and % CAP activity relative to control with the QM regimen and FIG. 20B showns % hemolysis and % CAP activity relative to control with the Q2W regimen. FIG. 20C shows the correlation of the hemolysis and CAP activity with the levels of C5 knockdown. The data demonstrate robust inhibition of both classical and alternative pathway of complement activity; specifically, C5 knockdown is associated with >80% (up to 96.2%) lowering of complement serum hemolytic activity and >90% (up to 96.9%) lowering of CAP activity.

### Example 9: C5 Silencing and Clinical Disease Activity in Mouse Model of Arthritis

[0917] AD-61679 (unmodified sense sequence: 5′-UGACAAAAUAACUCACUAUAA-3′; modified sense sequence: 5′-usgsAfcAfaAfaUfAfAfcUfcAfcUfaUfaaL96-3′; unmodified antisense sequence: 5′-UUAUAGUGAGUUAUUUUGUCAAU-3′; modified antisense sequence: 5′-usUfsauaGfuGfaGfuuaUfuUfuGfucasasudTdT-3′) was tested in a mouse model of anti-collagen antibody-induced arthritis (CAIA) for its ability to decrease serum C5 levels and to inhibit clinical disease activity, and compared to an anti-05 antibody. CAIA mice were administered AD-61679 (5 mg/kg, N=7), control siRNA (10 mg/kg, N=6), anti-05 antibody (50 mg/kg, N=7) and PBS (N=7). AD-61679 and siRNA control were administered three times (every 5 days—days−5, 0, 5); while the anti-05 antibody was administered once at day 0. Serum levels of C5 protein were measured using ELISA and are shown in FIG. 21. Clinical disease activity (CDA) was scored each day of the 10-day interval starting at day 0 and the results are shown in FIG. 22. Joint inflammation, pannus, and cartilage and bone damage were measured by scoring of hematoxylin and eosin (H&E) and Toluidine Blue histological stains (FIG. 23A). C3 deposition was also measured by immunohistochemistry using anti-C3 antibody (FIG. 23B).

[0918] As shown in FIG. 21, upregulation of the C5 levels over the 10-day treatment period is observed in mice treated with PBS, and control siRNA and anti-05 antibody, while robust knockdown of plasma C5 protein is observed in AD-61679 treated animals No modulation of C5 knockdown by LPS, injected on day 3, is observed. Circulating liver-derived C5 appears to be a key driver of pathology in CAIA mice, with the locally produced C5 playing little or no role. The data in FIGS. 22A and 22B demonstrate that treatment with AD-61679, similar to the treatment with the anti-C5 antibody, preserves joint histology, e.g., prevents inflammation, cartilage damage, bone damage and pannus, and prevents C3 deposition in the synovium and cartilage.

### Example 10: Effect of C5 Protein Knockdown in Rat Model of Membranous Nephropathy

[0919] AD-61679 was tested in a rat model of Passive Neymann Nephritis for its ability to reduce proteinurea. Nephritis was induced by injection of sheep anti-rat kidney fraction antiserum (anti-Fx1A) at day 0 and day 1. Control rats received no AD-61679 or anti-Fx1A treatment. Prior to the injection of anti-Fx1A, rats were administered AD-61679 at day −10, day −7 and day −3. AD-61679 was also administered on days 0, 1 and 4. Serum hemolytic activity in control rats, as well as rats treated with anti-Fx1a alone or with anti-Fx1a and AD-61679 was measured and is shown in FIG. 23A. Urine was collected on days 2 and 5, and levels of urinary protein at day 5 were measured and are shown in FIG. 23B. The data indicate that AD-61679 is efficient in reducing serum hemolytic activity and proteinurea in the rat model of Passive Neymann Nephritis.

We claim:

1. A double-stranded ribonucleic acid (dsRNA) agent for inhibiting expression of complement component C5, wherein said dsRNA comprises a sense strand and an antisense strand, the antisense strand comprising a region of complementarity to an mRNA encoding complement component C5, wherein the region of complementarity comprises at least 15 contiguous nucleotides differing by no more than 3 nucleotides from any one of the antisense sequences listed in any one of Tables 3, 4, 5, 6, 18, 19, 20, 21, and 23, and wherein the dsRNA comprises at least one modified nucleotide

2. The dsRNA agent of claim 1, wherein the sense and antisense strands comprise sequences selected from the group consisting of A-118320, A-118321, A-118316, A-118317, A-118332, A-118333, A-118396, A-118397, A-118386, A-118387, A-118312, A-118313, A-118324, A-118325, A-119324, A-119325, A-119332, A-119333, A-119328, A-119329, A-1193221, A-119323, A-119324, A-119325, A-119334, A-119335, A-119330. A-119331, A-119326, A-119327, A-125167, A-125173, A-125647, A-125157, A-125173, and A-125127.

3. The dsRNA agent of claim 1, wherein the dsRNA agent is selected from the group consisting of AD-58123, AD-58111, AD-58121, AD-58116, AD-58133, AD-58099, AD-58088, AD-58642, AD-58644, AD-58641, AD-58647, AD-58645, AD-58643, AD-58646, AD-61679, AD-62510, AD-62643, AD-62645, AD-62646, AD-62650, and AD-62651.

4. The dsRNA agent of claim 1, wherein substantially all of the nucleotides of said sense strand and substantially all of the nucleotides of said antisense strand are modified nucleotides,

5. The dsRNA agent of claim 1 further comprising a ligand.

6. A cell containing the dsRNA agent of claim 1.

7. A pharmaceutical composition suitable for subcutaneous injection to a subject for inhibiting expression of a complement component C5 gene, comprising the dsRNA agent of claim 1.

8. A method of inhibiting complement component C5 expression in a cell, the method comprising:
(a) contacting the cell with the dsRNA agent of claim 1; and
(b) maintaining the cell produced in step (a) for a time sufficient to obtain degradation of the mRNA transcript of a complement component C5 gene, thereby inhibiting expression of the complement component C5 gene in the cell.

9. A method of treating a subject having a disease or disorder that would benefit from reduction in complement component C5 expression, the method comprising administering to the subject a therapeutically effective amount of the dsRNA agent of claim 1, thereby treating said subject.

10. A method of preventing at least one symptom in a subject having a disease or disorder that would benefit from reduction in complement component C5 expression, the method comprising administering to the subject a prophylactically effective amount of the dsRNA agent of any one of claim 1, thereby preventing at least one symptom in the subject having a disorder that would benefit from reduction in C5 expression.

11. The method of claim 9 or 10, wherein the subject is human.

12. The method of claim 9 or 10, wherein the disorder is a complement component C5-associated disease.

13. The method of claim 11, wherein the complement component C5-associated disease is selected from the group consisting of paroxysmal nocturnal hemoglobinuria (PNH), atypical hemolytic uremic syndrome (aHUS), asthma, rheumatoid arthritis (RA); antiphospholipid antibody syndrome; lupus nephritis; ischemia-reperfusion injury; typical or infectious hemolytic uremic syndrome (tHUS); dense deposit disease (DDD); neuromyelitis optica (NMO); multifocal motor neuropathy (MMN); multiple sclerosis (MS); macular degeneration (e.g., age-related macular degeneration (AMD)); hemolysis, elevated liver enzymes, and low platelets (HELLP) syndrome; thrombotic thrombocytopenic purpura (TTP); spontaneous fetal loss; Pauci-immune vasculitis; epidermolysis bullosa; recurrent fetal loss; pre-eclampsia, traumatic brain injury, myasthenia gravis, cold agglutinin disease, dermatomyositis bullous pemphigoid, Shiga toxin E. coli-related hemolytic uremic syndrome, C3 nephropathy, anti-neutrophil cytoplasmic antibody-associated vasculitis, humoral and vascular transplant rejection, graft dysfunction, myocardial infarction, an allogenic transplant, sepsis, Coronary artery disease, dermatomyositis, Graves' disease, atherosclerosis, Alzheimer's disease, systemic inflammatory response sepsis, septic shock, spinal cord injury, glomerulonephritis, Hashimoto's thyroiditis, type I diabetes, psoriasis, pemphigus, autoimmune hemolytic anemia (AIHA), ITP, Goodpasture syndrome, Degos disease, antiphospholipid syndrome (APS), catastrophic APS (CAPS), a cardiovascular disorder, myocarditis, a cerebrovascular disorder, a peripheral vascular disorder, a renovascular disorder, a mesenteric/enteric vascular disorder, vasculitis, Henoch-Schönlein purpura nephritis, systemic lupus erythematosus-associated vasculitis, vasculitis associated with rheumatoid arthritis, immune complex vasculitis, Takayasu's disease, dilated cardiomyopathy, diabetic angiopathy, Kawasaki's disease (arteritis), venous gas embolus (VGE), and restenosis following stent placement, rotational atherectomy, membraneous nephropathy, Guillain-Barre syndrome, and percutaneous transluminal coronary angioplasty (PTCA).

14. The method of claim 9 or 10, further comprising administering an anti-complement component C5 antibody, or antigen-binding fragment thereof, to the subject.

15. The method of claim 9 or 10, wherein the dsRNA agent is administered at a dose of about 0.01 mg/kg to about 10 mg/kg or about 0.5 mg/kg to about 50 mg/kg.

16. The method of claim 15, wherein the dsRNA agent is administered to the subject once a week; twice a week; or twice a month.

17. The method of claim 9 or 10, wherein the dsRNA agent is administered to the subject every day at a dose of 5 mg/kg for 5 days, followed by administration every week for 8 weeks at a dose of 5 mg/kg, followed by a monthly administration of a dose of 10 mg/kg thereafter.

18. A method of treating a subject having a arthritis, the method comprising administering to the subject a therapeutically effective amount of the dsRNA agent of claim 1, thereby treating said subject.

19. A method of treating or preventing at least one symptom in a subject having or prone to having arthritis, the method comprising administering to the subject an effective amount of the dsRNA agent of claim 1, thereby treating or preventing at least one symptom in the subject having arthritis.

20. The method of claim 18 or 19, wherein the symptom is joint damage.

21. The method of claim 20, wherein after administration of the dsRNAi agent the subject exhibits reduced cartilage destruction; reduced bone erosion; reduced chondrocyte death, or a combination thereof.

The application's sequence listing, which the Patent Office published only in electronic form, follows.

SEQUENCE LISTING (2900 sequences)

SEQ ID NO: 1 - DNA, 5480 bp, Homo sapiens
tatatccgtggtttcctgctacctccaaccatgggccttttgggaatactttgttttttaatcttcctggggaaaacctggggacaggagcaaacatatgtcatttcagcaccaaaaatattccgtgttggagcatctgaaaatattgtgattcaagtttatggatacactgaagcatttgatgcaacaatctctattaaaagttatcctgataaaaaatttagttactcctcaggccatgttcatttatcctcagagaataaattccaaaactctgcaatcttaacaatacaaccaaaacaattgcctggaggacaaaacccagtttcttatgtgtatttggaagttgtatcaaagcatttttcaaaatcaaaaagaatgccaataacctatgacaatggatttctcttcattcatacagacaaacctgtttatactccagaccagtcagtaaaagttagagtttattcgttgaatgacgacttgaagccagccaaaagagaaactgtcttaactttcatagatcctgaaggatcagaagttgacatggtagaagaaattgatcatattggaattatctcttttcctgacttcaagattccgtctaatcctagatatggtatgtggacgatcaaggctaaatataaagaggacttttcaacaactggaaccgcatattttgaagttaaagaatatgtcttgccacatttttctgtctcaatcgagccagaatataatttcattggttacaagaactttaagaattttgaaattactataaaagcaagatatttttataataaagtagtcactgaggctgacgtttatatcacatttggaataagagaagacttaaaagatgatcaaaaagaaatgatgcaaacagcaatgcaaaacacaatgttgataaatggaattgctcaagtcacatttgattctgaaacagcagtcaaagaactgtcatactacagtttagaagatttaaacaacaagtacctttatattgctgtaacagtcatagagtctacaggtggattttctgaagaggcagaaatacctggcatcaaatatgtcctctctccctacaaactgaatttggttgctactcctcttttcctgaagcctgggattccatatcccatcaaggtgcaggttaaagattcgcttgaccagttggtaggaggagtcccagtaacactgaatgcacaaacaattgatgtaaaccaagagacatctgacttggatccaagcaaaagtgtaacacgtgttgatgatggagtagcttcctttgtgcttaatctcccatctggagtgacggtgctggagtttaatgtcaaaactgatgctccagatcttccagaagaaaatcaggccagggaaggttaccgagcaatagcatactcatctctcagccaaagttacctttatattgattggactgataaccataaggctttgctagtgggagaacatctgaatattattgttacccccaaaagcccatatattgacaaaataactcactataattacttgattttatccaagggcaaaattatccactttggcacgagggagaaattttcagatgcatcttatcaaagtataaacattccagtaacacagaacatggttccttcatcccgacttctggtctattacatcgtcacaggagaacagacagcagaattagtgtctgattcagtctggttaaatattgaagaaaaatgtggcaaccagctccaggttcatctgtctcctgatgcagatgcatattctccaggccaaactgtgtctcttaatatggcaactggaatggattcctgggtggcattagcagcagtggacagtgctgtgtatggagtccaaagaggagccaaaaagcccttggaaagagtatttcaattcttagagaagagtgatctgggctgtggggcaggtggtggcctcaacaatgccaatgtgttccacctagctggacttaccttcctcactaatgcaaatgcagatgactcccaagaaaatgatgaaccttgtaaagaaattctcaggccaagaagaacgctgcaaaagaagatagaagaaatagctgctaaatataaacattcagtagtgaagaaatgttgttacgatggagcctgcgttaataatgatgaaacctgtgagcagcgagctgcacggattagtttagggccaagatgcatcaaagctttcactgaatgttgtgtcgtcgcaagccagctccgtgctaatatctctcataaagacatgcaattgggaaggctacacatgaagaccctgttaccagtaagcaagccagaaattcggagttattttccagaaagctggttgtgggaagttcatcttgttcccagaagaaaacagttgcagtttgccctacctgattctctaaccacctgggaaattcaaggcgttggcatttcaaacactggtatatgtgttgctgatactgtcaaggcaaaggtgttcaaagatgtcttcctggaaatgaatataccatattctgttgtacgaggagaacagatccaattgaaaggaactgtttacaactataggacttctgggatgcagttctgtgttaaaatgtctgctgtggagggaatctgcacttcggaaagcccagtcattgatcatcagggcacaaagtcctccaaatgtgtgcgccagaaagtagagggctcctccagtcacttggtgacattcactgtgcttcctctggaaattggccttcacaacatcaatttttcactggagacttggtttggaaaagaaatcttagtaaaaacattacgagtggtgccagaaggtgtcaaaagggaaagctattctggtgttactttggatcctaggggtatttatggtaccattagcagacgaaaggagttcccatacaggatacccttagatttggtccccaaaacagaaatcaaaaggattttgagtgtaaaaggactgcttgtaggtgagatcttgtctgcagttctaagtcaggaaggcatcaatatcctaacccacctccccaaagggagtgcagaggcggagctgatgagcgttgtcccagtattctatgtttttcactacctggaaacaggaaatcattggaacatttttcattctgacccattaattgaaaagcagaaactgaagaaaaaattaaaagaagggatgttgagcattatgtcctacagaaatgctgactactcttacagtgtgtggaagggtggaagtgctagcacttggttaacagcttttgctttaagagtacttggacaagtaaataaatacgtagagcagaaccaaaattcaatttgtaattctttattgtggctagttgagaattatcaattagataatggatctttcaaggaaaattcacagtatcaaccaataaaattacagggtaccttgcctgttgaagcccgagagaacagcttatatcttacagcctttactgtgattggaattagaaaggctttcgatatatgccccctggtgaaaatcgacacagctctaattaaagctgacaactttctgcttgaaaatacactgccagcccagagcacctttacattggccatttctgcgtatgctctttccctgggagataaaactcacccacagtttcgttcaattgtttcagctttgaagagagaagctttggttaaaggtaatccacccatttatcgtttttggaaagacaatcttcagcataaagacagctctgtacctaacactggtacggcacgtatggtagaaacaactgcctatgctttactcaccagtctgaacttgaaagatataaattatgttaacccagtcatcaaatggctatcagaagagcagaggtatggaggtggcttttattcaacccaggacacaatcaatgccattgagggcctgacggaatattcactcctggttaaacaactccgcttgagtatggacatcgatgtttcttacaagcataaaggtgccttacataattataaaatgacagacaagaatttccttgggaggccagtagaggtgcttctcaatgatgacctcattgtcagtacaggatttggcagtggcttggctacagtacatgtaacaactgtagttcacaaaaccagtacctctgaggaagtttgcagcttttatttgaaaatcgatactcaggatattgaagcatcccactacagaggctacggaaactctgattacaaacgcatagtagcatgtgccagctacaagcccagcagggaagaatcatcatctggatcctctcatgcggtgatggacatctccttgcctactggaatcagtgcaaatgaagaagacttaaaagcccttgtggaaggggtggatcaactattcactgattaccaaatcaaagatggacatgttattctgcaactgaattcgattccctccagtgatttcctttgtgtacgattccggatatttgaactctttgaagttgggtttctcagtcctgccactttcacagtgtacgaataccacagaccagataaacagtgtaccatgttttatagcacttccaatatcaaaattcagaaagtctgtgaaggagccgcgtgcaagtgtgtagaagctgattgtgggcaaatgcaggaagaattggatctgacaatctctgcagagacaagaaaacaaacagcatgtaaaccagagattgcatatgcttataaagttagcatcacatccatcactgtagaaaatgtttttgtcaagtacaaggcaacccttctggatatctacaaaactggggaagctgttgctgagaaagactctgagattaccttcattaaaaaggtaacctgtactaacgctgagctggtaaaaggaagacagtacttaattatgggtaaagaagccctccagataaaatacaatttcagtttcaggtacatctaccctttagattccttgacctggattgaatactggcctagagacacaacatgttcatcgtgtcaagcatttttagctaatttagatgaatttgccgaagatatctttttaaatggatgctaaaattcctgaagttcagctgcatacagtttgcacttatggactcctgttgttgaagttcgtttttttgttttcttctttttttaaacattcatagctggtcttatttgtaaagctcactttacttagaattagtggcacttgcttttattagagaatgatttcaaatgctgtaactttctgaaataacatggccttggagggcatgaagacagatactcctccaaggttattggacaccggaaacaataaattggaacacctcctcaaacctaccactcaggaatgtttgctggggccgaaagaacagtccattgaaagggagtattacaaaaacatggcctttgcttgaaagaaaataccaaggaacaggaaactgatcattaaagcctgagtttgctttcaaaaaaaaaaaaaaaaaa

SEQ ID NO: 2 - DNA, 5384 bp, Macaca mulatta
  modified_base (2876)..(2895): a, c, t, g, unknown or other
catgatttcctgctacctccaaccatgggccttttgggaatactttgttttttaatcttcctgggaaaaacttggggacaggagcaaacatatgtcatttcagcaccaaaaatattccgtgttggagcatctgaaaacattgtgattcaagtttatggatacactgaagcatttgatgcaacaatctctattaaaagttatcctgataaaaaatttagttactcctcaggccatgttcatttatcctcagagaataaattccaaaactcggcagtcttaacaatacaaccaaaacaattacctggaggacaaaaccaagtttcttatgtgtatttggaagttgtatcaaagcatttttcaaaatcaaaaaaaattccaataacctatgacaatggatttctcttcattcatacagacaaacctgtttatactccagaccaatcagtaaaggttagagtttattcgttgaatgatgacttgaagccagccaaaagagaaactgtcttaactttcatagatcctgaaggatcagaaattgacatggtagaagaaattgatcatattggaattatctcttttcctgacttcaagattccgtctaatcctagatatggtatgtggatgatccaggctaaatataaagaggacttttcaacaactggaactgcattttttgaagttaaagaatatgtcttgccacatttttctgtctcagtagaaccagaaagtaatttcattggttataagaactttaagaattttgaaattactataaaagcaagatatttttataataaagtagtcactgaggctgatgtttatatcacatttggaataagagaagacttaaaagatgatcaaaaagaaatgatgcaaacagcaatgcaaaacacaatgttgataaatggaattgctcaagtcacatttgattctgaaacagcagtcaaagaactgtcatactacagtttagaagatttaaacaacaagtacctttatattgctgtaacagtcatagagtctacaggtggattttctgaagaggcagaaatacctggcatcaaatatgtcctctctccctacaaactgaatttggttgctactcctcttttcctgaagcctgggattccatattccatcaaggtgcaggttaaagatgcgcttgaccagttggtaggaggggtcccagtaacactgaatgcacaaacaattgatgtcaaccaagagacatctgacttggagccaaggaaaagtgtaacacgtgttgatgatggagtagcttcgtttgtggttaatctcccatctggagtgacggtgctggagtttaatgtcaaaactgatgctccagatcttccagacgaaaatcaggccagggaaggttaccgagcaatagcatactcatctctcagccaaagttacctttatatcgattggactgataaccacaaggctttgctagtgggagaatatttgaatattattgttacccccaaaagcccatatattgacaaaataactcactataattacttgattttatccaagggcaaaattatccactttggcacaagggagaaactttcagatgcatcttatcaaagtataaacattccagtaacgcagaacatggttccttcatcccgactcctggtctattacatcgtcacaggagagcagacagcagaattagtgtctgattcagtctggttaaatattgaagaaaaatgtggcaaccagctccaggttcatctgtctcctgatgcagatacatattctccaggccaaactgtgtctcttaatatggtaactgggatggattcctgggtggcattaacagcagtggacagcgctgtgtatggagtccaaagaagagccaaaaagcccttggaaagagtatttcaattcttagagaagagtgatctgggctgtggggcaggtggtggcctcaacaatgccaatgtgttccacctagctggacttaccttcctcactaatgcaaatgcagatgactcccaagaaaatgatgaaccttgtaaagaaattatcaggccaagaagaatgctacaagagaagatagaagaaatagctgctaaatataaacatttagtagtgaagaaatgttgttacgatggagtccgtattaatcatgatgaaacctgtgagcagcgagctgcacggattagtgtagggccgagatgcgtcaaagctttcactgaatgttgtgtcgtcgcaagccagctccgtgctaataactctcataaagacttgcaattgggaaggctacacatgaagaccctgttaccagtaagcaagccagaaattcggagttattttccagaaagctggttatgggaagttcatcttgttcccagaagaaaacagttgcagtttgccctacctgattctgtaactacctgggaaattcaaggtgttggcatttcaaacagtggtatatgtgttgctgatactattaaggcaaaggtgttcaaagatgtcttcctggaaatgaatataccatattctgttgtacgaggagaacaggtccagttgaaaggaactgtttacaactataggacttctgggatgcagttctgtgttaaaatgtctgctgtggagggaatctgcacttcagaaagcccagtcattgatcatcagggcacaaagtcctccaaatgtgtgcgacagaaagtagagggctcctctaatcacttggtgacctttactgtgcttcctctggaaattggccttcagaacatcaatttctcactggagacttcgtttggaaaagaaatcttagtaaaatcgttacgagtggtgccagaaggtgtcaaaagggaaagctattctggtattactttggatcctaggggtatttatgnnnnnnnnnnnnnnnnnnnncgaaaggagttcccatacaggataccattagatttggtccccaaaacagaaatcaaaaggattttgagtgtaaaaggactgcttgtaggtgagatcttgtctgcagttctaagtcgggaaggcatcaatatcctaacccacctccccaaagggagtgcagaggcggagctgatgagcgttgtcccagtattctatgtttttcactacctggaaacaggaaatcattggaacatttttcattccgacccattaattgaaaagcggaacctggagaaaaaattaaaagaagggatggtgagcattatgtcctacagaaatgctgactattcttacagcgtgtggaagggtggcagtgctagcacttggttaacagcttttgctttaagagtacttggacaagtacataaatatgtagagcagaaccaaaattcaatatgtaattctttattgtggctggttgagaattatcagttagataatggatccttcaaggaaaattcacagtatcaaccaataaaattacagaaaatcaacacagctctaattaaagctgacacctttctgcttgaaaatacactgccagcccagagcacctttacattggccatttctgcctatgctctttccctgggagataaaactcacccacagttttgttcaattgtttcagctttgaagagagaagctttggttaaaggtaatccacccatttatcgtttttggaaagacagtcttcaacataaagacagctctgtacctaacactggtacagcacgtatggtagaaacaactgcctatgctttactcaccagtctgaacttgaaagacataaattatgttaacccaatcatcaaatggctatcagaagagcagaggtatggaggtggcttttattcaacccaggacacaatcaatgccatcgagggcctgacagaatattcactcctggttaaacagctccgcttgaatatggacatcgatgttgcttacaagcataaaggtcccttacataattataaaatgacagacaagaatttccttgggaggccagtagaggtgcttctcaatgatgacctcgttgtcagtacaggatttggcagtggcttggctacggtacatgtaacaactgtagttcacaaaaccagtacctctgaggaagtttgcagcttttatttgaaaattgatactcaggatattgaagcatcccactacagaggctacggaaactctgattacaaacgcatagtagcatgtgccagctacaagcccagcaaggaagaatcatcttctggatcctctcatgcagtgatggacatctccttgcctactggaatcaatgcaaatgaagaagacttaaaagctcttgtggaaggggtggatcagctattcactgattaccaaataaaagatggacatgttattctgcaactgaattcgatcccctccagtgatttcctttgtgtacgattccggatttttgaactctttgaagttgggtttcttagtcctgccactttcacagtgtatgaataccacagaccagataaacagtgtaccatgttttatagcacttccaatatcaaaattcagaaagtctgtgaaggagccacgtgcaagtgtatagaagctgattgtgggcaaatgcagaaagaattggatctgacaatctctgcagagactagaaaacaaacagcatgtaacccagagattgcatatgcttataaagttatcatcacatccatcactacagaaaatgtttttgtcaagtacaaggcaacccttctggatatctacaaaactggggaagctgttgctgaaaaagactctgaaatcaccttcattaaaaaggtaacctgcactaacgctgagctggtgaaaggaagacagtacttaattatggggaaagaagctctccagataaaatacaatttcactttcaggtacatctaccctttagattccttgacctggattgaatactggcctagagacacaacatgttcatcgtgtcaagcatttttagctaatttagatgaatttgctgaagacatctttttaaatggatgctaaaattcctgaagttcagctgcatacagtttgcacttatggactcctgttgttgaagtttgtttttttttctcgtttttttgtctttaaacattcacagctggtcttatttgtaaagctcactttacttagaattagtggcacttgcttttattagagaatgattttaaacgctgtaactttctgaaataacatggccttggagggcatgaagacagatactcctccaaggttattggacaccggaaacaataaattagaacacctcctcaaacctaccacttaggaatgtttgctggagccgaaagaacagtccattgaaatggagtattacaaaaacatggcctttgcttgaaagaaaataccaggggacaggaaactgatcattaaagcctgagtttgctttcaaactgtgctaaaaa

SEQ ID NO: 3 - DNA, 5448 bp, Mus musculus
tttaaaaggaaagtggttacagggaggccatgcccatgggtttatgccgctaccagccatgggtctttggggaatactttgtcttttaattttcctggacaaaacttggggacaggaacaaacctacgtcatttcagcacccaaaatcctccgggtcggctcgtctgaaaatgtggtaattcaagtccatggctacactgaagcatttgatgcaactctttctctaaaaagctatcctgacaaaaaagtcaccttctcttcaggctatgttaatttgtccccggaaaacaaattccaaaacgcggcactgttgacactacagcccaatcaagttcctagagaagaaagcccagtctctcacgtgtatctggaagttgtgtcaaaacacttttcaaaatcaaagaaaataccaattacctataacaatggaattctcttcatccatacagacaaacctgtttacacgccggaccagtcagtaaagatcagagtctattctctgggtgacgacttgaagccagccaaacgggagactgtcttaactttcatagaccccgaaggatcagaagttgacattgtagaagaaaatgattacaccggaattatctcttttcctgacttcaagattccatctaatcccaagtatggtgtttggacaattaaagctaactataagaaggattttacaacaactggaactgcatactttgaaattaaagaatatgtcttgccacgattctctgtttcaatagaactagaaagaaccttcattggctataaaaactttaagaactttgaaatcactgtgaaagcaagatatttttataataaagtggtacctgatgctgaagtgtatgccttttttggattgagagaggacataaaagatgaggagaagcagatgatgcacaaagccacacaagccgcaaagttggttgacggagttgctcagatctcttttgattctgaaacagcagttaaagagctgtcctacaacagtctagaagacttaaacaacaagtacctttatattgcagtaacagtcacagaatcttcaggtggattttcagaagaggcagaaatccctggagtcaaatatgtcctctctccctacacactgaatttggtcgctactcctcttttcgtgaagcccgggattccattttccatcaaggcacaggttaaagattcactcgagcaggcggtaggaggggtcccagtaactctgatggcacaaacagtcgatgtgaatcaagagacatctgacttggaaacaaagaggagcatcactcatgacactgatggagtagctgtgtttgtgctgaacctcccatcaaatgtgacggtgctaaagtttgagatcagaactgatgacccagaacttcccgaagaaaatcaagccagcaaagagtacgaagcagttgcgtactcgtctctcagccaaagttacatttacatcgcttggactgaaaactacaagcccatgcttgtgggagaatacctgaatattatggttacccccaagagcccatatatcgacaaaataactcactataattacttgattttatccaaaggcaaaattgtacagtacggcacaagagagaaacttttctcctcaacttatcaaaatataaatattccagtgacacagaacatggttccttcagcacgactcctggtctattacatagtcacaggggagcaaacagcagaattagtggctgacgcagtctggataaatattgaggagaagtgtggcaaccagctccaggtccatctgtctccagatgaatatgtgtattctccaggccaaactgtgtcccttgacatggtgactgaagcagactcatgggtagcactatcagcagtggacagagctgtgtataaagtccagggaaacgccaaaagggccatgcaaagagtctttcaagctttggatgaaaagagtgacctgggctgtggggcaggtggtggccatgacaatgcagatgtattccatctagctgggctcaccttcctcaccaacgcaaacgcagatgactcccattatcgtgatgactcttgtaaagaaattctcaggtcaaagagaaacctgcatctcctaaggcagaaaatagaagaacaagctgctaagtacaaacatagtgtgccaaagaaatgctgctatgacggagcccgagtgaacttctacgaaacctgtgaggagcgagtggcccgggttaccataggccctctctgcatcagggccttcaacgagtgctgtactattgcgaacaagatccgaaaagaaagcccccataaacctgtccaactgggaaggatccacattaagaccctgttaccagtgatgaaggcagatatccgaagctactttccagagagctggctatgggaaattcatcgcgttcccaaaagaaaacagctgcaggtcacgctgcctgactcactaacgacttgggaaattcaaggcattggcatttcagacaatggtatatgtgttgctgatacactcaaggcaaaggtgttcaaagaagtcttcctggagatgaacataccatattctgttgtgcgaggagaacagatccaattgaaaggaactgtttacaactatatgacctcagggacaaagttctgtgttaaaatgtctgctgtggaggggatctgcacttcaggaagctcagctgctagccttcacacctccaggccctccagatgtgtgttccagaggatagagggctcgtccagtcacttggtgaccttcaccctgcttcctctggaaattggccttcactccataaacttctcactagagacctcatttgggaaagacatcttagtaaagacattacgggtagtgccagaaggagtcaagagggaaagctatgccggcgtgattctggaccctaagggaattcgtggtattgttaacagacgaaaggaattcccatacaggatcccattagatttggtccccaagaccaaagttgaaaggattttgagtgtcaaaggactgcttgtaggggagttcttgtccacggttctgagtaaggaaggcatcaacatcctaacccacctccccaagggcagtgcagaggcagagctcatgagcatagctccggtgttctatgttttccactacctggaagcaggaaaccattggaatattttctatcctgatacactgagtaaaagacagagcctggagaaaaaaataaaacaaggggtggtgagcgtcatgtcctacagaaacgctgactattcctacagcatgtggaagggggcgagcgctagtacctggctgacagcttttgctctgagagtgcttggacaggtggccaagtatgtaaaacaggatgaaaactcaatttgtaactctttgctatggctggttgagaagtgtcagctggaaaacggctctttcaaggaaaattcccaatatctaccaataaaattacagggtactttgcctgctgaagcccaagagaaaactttgtatcttacagccttttctgtgattggaattagaaaggcagttgacatatgccccaccatgaaaatccacacagcgctagataaagccgactccttcctgcttgaaaacaccctgccatccaagagcaccttcacactggccattgtagcctatgctctttccctaggagacagaacccacccgaggtttcgtctaattgtgtcggccctgaggaaggaagcttttgttaaaggtgatccgcccatttaccgttactggagagataccctcaaacgtccagacagctctgtgcccagcagcggcacagcaggtatggttgaaaccacagcctatgctttgctcgccagcctgaaactgaaggatatgaattacgccaaccccatcatcaagtggctatctgaagagcagaggtatggaggcggcttttattccacccaggatacgattaatgccatcgagggcctgacagaatattcactcctgttaaaacaaattcatttggatatggacatcaatgtcgcctacaaacacgaaggtgacttccacaagtataaggtgacagagaagcatttcctggggaggccagtggaggtatctctcaatgatgaccttgttgtcagcacaggctacagcagtggcttggccacagtatatgtaaaaactgtggttcacaaaattagtgtctctgaggaattttgcagcttttacttgaaaattgatacccaagatattgaagcatccagccacttcaggctcagtgactctggattcaagcgcataatagcatgtgccagctacaagcccagcaaggaggagtcaacatccgggtcctcccatgcagtaatggatatatcactgccgactggaatcggagcaaacgaggaagatttacgggctcttgtggaaggagtggatcaactactaactgattaccagatcaaagatggccatgtcattctgcaactgaattcgatcccctccagagatttcctctgtgtccggttccggatatttgaacttttccaagttgggtttctgaatcctgctaccttcacggtgtacgagtatcacagaccagataagcagtgcaccatgatttatagcatttctgacaccaggcttcagaaagtctgtgaaggagcagcttgcacatgtgtggaagctgactgtgcgcaactgcaggcagaagtagacctagccatctctgcagactccagaaaagagaaagcctgtaaaccagagactgcatatgcttataaagtcaggatcacatcagccactgaagaaaatgtttttgtcaagtacactgcgactcttctggtcacttacaaaacaggggaagctgctgatgagaattcggaggtcaccttcattaaaaagatgagctgtaccaatgccaacctggtgaaagggaagcagtatttaatcatgggcaaagaggttctgcagatcaaacacaatttcagtttcaagtatatataccctctagattcctccacctggattgaatattggcccacagacacaacgtgtccatcctgtcaagcatttgtagagaatttgaataactttgctgaagacctctttttaaacagctgtgaatgaaaagttctgctgcacgaagattcctcctgcggcggggggattgctcctcctctggcttggaaacctagcctagaatcagatacactttctttagagtaaagcacaagctgatgagttacgactttgtgaaatggatagccttgaggggaggcgaaaacaggtcccccaaggctatcagatgtcagtgccaatagactgaaacaagtctgtaaagttagcagtcaggggtgttggttggggccggaagaagagacccactgaaactgtagccccttatcaaaacatatccttgcttgaaagaaaaataccaaggacagaaaatgccataaaatcttgactttgcactc

SEQ ID NO: 4 - DNA, 4497 bp, Rattus norvegicus
atggatagcacagagaccgacagatgtcctacagcccgccatcatctttccggaaacattaactcagtgcttgctgcccttgtaggtgggttttcggaagaggcagaaattcctggcatcaaatacgtcctctctccctatacactgaatttggtcgctacccctcttttcctgaagcctgggattccattttccatcaaggtacaggttaaggattcactcgagcagttggtaggaggggtcccagtaactctgatggcacaaacagtcaatgtgaatcaagagacatctgacttggaaccaaagaggagcatcacacactctgctgatggagtggcttcatttgtggtgaacctcccatcagaagtgacatcactgaagtttgaggtcaaaactgatgccccggaacttcccgaagaaaatcaagccagcaaagaatatgaagcagttacatactcatccctcagccagagttacatttacattggctggactgaaaactacaagcccatgcttgtgggagaatatctgaatattatcgtcacccccaagagtccatatattgacaaaataactcactataattacttgattttatccaaaggcaaaattgtacagtatggcacaaaggagaaacttctctattcatcttatcaaaatataaacatcccagtgacacaggacatggttccttcagcgcggctcctggtctattacatagtcacgggggagcagacagcagaattggtggctgacgcagtctggataaacattgaggagaagtgtggcaaccagctccaggtccatctgtctccagataaagacgtgtattctccaggccaaactgtgtcccttgacatggtgactgaagcagactcatgggtggcactatctgcggtggacagcgctgtgtatggagtccggggaaaagccaaaagggccatgcaaagagtgttccaagcttttgatgacaagagtgacctgggctgtggggcaggtggtggccgtgacaatgtagatgtattccatctagctgggctcaccttcctcaccaatgcaaacgcagatgactcccaataccacgatgactcttgtaaggaaattctcaggccaaagagagacctgcagctcctgcatcagaaagtggaagaacaagctgctaaatacaaacaccgtgtgcccaagaaatgctgttatgatggagcccgagaaaacaaatacgaaacctgtgagcagcgagttgcccgggtgaccataggcccacactgcatcagggccttcaacgagtgttgtactattgcggataagatccgaaaagaaagccaccacaaaggcatgctgttgggaaggatccaaataaaggccctgttaccagtgatgaaggcagaaatccgaagctactttccagagagctggctatgggaagttcatcgtgttcccaaaagaaaccagctgcaggttgcactgcctgactcactgacgacctgggaaattcaaggcatcggcatctcagacaatggtatatgtgttgctgacacactcaaggcaaaggtgttcaaagatgtcttcctggagatgaacataccatattctgttgtacgaggggagcagatccaattgaagggaaccgtttacaattataggacctctgggacaatgttctgtgttaaaatgtctgccgtggagggaatctgcactccaggaagctcggctgctagccctcagacctctaggtcctccagatgtgtgcgccagagaatagagggctcctccagtcacttggtgaccttcagcctgcttcctctggaaattggccttcactccataaacttctcactagagacttcatttgggaaagaaatcttagtgaagacattacgggtagtgccagaagggatcaaaagggaaagctatgctggtgtgactctggaccccaggggagtttatggtattgttaacagacgaaaggaattcccatacaggataccattagatttggtccccaaaaccaacgtcaaaaggattttgagtgtaaaaggactgcttataggggaattcttgtccacggttctgagtaaagaaggcatcgacatcctaacccacctccccaagggcagcgccgaggcagaactcatgagcatagtcccggtgttctacgttttccactacctggaagcaggaaaccattggaatattttccaccctgatacgttagctagaaaacagagcctgcagaaaaaaataaaagaagggctggtgagcgtcatgtcctacagaaacgctgactattcctacagcatgtggaagggagcaagctctagtgcctggctgacagcttttgctctgagagtgcttggacaggtgaacaagtatgtgaaacaagaccaatactcgatctgtaactccttgttatggctgattgagaagtgtcagctggaaaacggatctttcaaggaaaattcccaatatctaccaataaaattacagggtactttgcctgctgaagcccaagagaacactttatatcttacagccttttctgtgattggaattagaaaggctattggcatatgccccacggagaaaatctacacagcgctggctaaagctgactccttcctacttgaaaggaccctgccttccaagagcaccttcaccctggccattgtggcctatgctctctccctgggagacagaacccacccgaagtttcgttctattgtgtcagccctgaagagggaagctttggttaaaggagacccgcccatttaccgtttctggagagacactctccaacgtccagacagctcagcacccaacagcggcacagcaggtatggtagaaaccacggcctatgctttgctcaccagcctgaacctgaaggagacgagttatgtcaacccgatcatcaagtggctatctgaggagcagaggtatggaggcggcttttattccacccaggataccattaacgccatcgagggcctgacagagtattcactcctggttaaacaacttcatttggatatggatatcaatgtctcctacaaacacaaaggggatttctaccagtataaagtgacagagaagaacttcctcgggaggccagtggaggtacccctcaatgatgacctcatcgtcaccacaggctatagcagtggcttggctacagtatatgtaaaaactgtggttcacaaaactagtgtcgctgaggaattttgcagcttttacttgaaaattgatacccaagaagttgaagcctccagctacctcagctacagtgactcgggacacaagcgcataatagcctgtgccagctacaagcccagcaaggaggagtcagcatctgggtcctcccatgcagtaatggatatactgctgccgaccggaatcggagcaaaccaagaagatttacgagctcttgtggaaggagtagatcaactcctaactgattaccagatcaaagacagtcatgttattctgcaattgaattcgattccctccagagatttcctttgtgttcggttccggatatttgaacttttccaagttgggtttctgaatcctgctacgttcacggtgtacgagtatcacagaccagataagcagtgtaccatgatttacagcacttctgacaccaaccttcagagagtctgtgaaggagcggcatgcaaatgcgttgaagctgattgtgggcaactgcaggcagaactggacctggccatctctgcagacaccaggaaagaaacagcatgtaaaccagagattgcatatgcttataaggtcaggatcacgtcggccacggaagaaaacatttttgtcaagtacactgcgacgcttctggatatttacaaaacaggggaagccgctgctgagaaggactctgagatcaccttcattaaaaagataagctgtaccaacgccaacctggtgaaaggaaagcaatatttaatcatgggcaaagaggctctgcagatcaaacacaatttcagtttcaagtatatataccctctagattcctccacctggattgaatattggcccacagacacaacgtgtccatcctgccaagcgtttgtagctaatttggacgagttcgctgaagacatctttctaaatggctgtgaaaatgcctgaggaagttctgctgcgtggccttcccgggtactcctgttggtggctcctaggagccaggatcgcttggaaacttagcctagaatcggatacattttctttatagtaaagcgtaagttgaagagttactttgtgaaacaaaatagccttgtggagagccgaaggcaggtcccccaaggctattggacatcagcaccaataagctggaacaagtctgtaacgttagcagccaggggtgtttgttggggccggaagaagagactcactgaaattgtagccccttaggaaaacatggtcttgcttgaaaaaaaaaataccaaggacagaaaatgccataaaagcttgactttgcactcaactgta

SEQ ID NO: 5 - DNA, 5480 bp, Homo sapiens
ttttttttttttttttttgaaagcaaactcaggctttaatgatcagtttcctgttccttggtattttctttcaagcaaaggccatgtttttgtaatactccctttcaatggactgttctttcggccccagcaaacattcctgagtggtaggtttgaggaggtgttccaatttattgtttccggtgtccaataaccttggaggagtatctgtcttcatgccctccaaggccatgttatttcagaaagttacagcatttgaaatcattctctaataaaagcaagtgccactaattctaagtaaagtgagctttacaaataagaccagctatgaatgtttaaaaaaagaagaaaacaaaaaaacgaacttcaacaacaggagtccataagtgcaaactgtatgcagctgaacttcaggaattttagcatccatttaaaaagatatcttcggcaaattcatctaaattagctaaaaatgcttgacacgatgaacatgttgtgtctctaggccagtattcaatccaggtcaaggaatctaaagggtagatgtacctgaaactgaaattgtattttatctggagggcttctttacccataattaagtactgtcttccttttaccagctcagcgttagtacaggttacctttttaatgaaggtaatctcagagtctttctcagcaacagcttccccagttttgtagatatccagaagggttgccttgtacttgacaaaaacattttctacagtgatggatgtgatgctaactttataagcatatgcaatctctggtttacatgctgtttgttttcttgtctctgcagagattgtcagatccaattcttcctgcatttgcccacaatcagcttctacacacttgcacgcggctccttcacagactttctgaattttgatattggaagtgctataaaacatggtacactgtttatctggtctgtggtattcgtacactgtgaaagtggcaggactgagaaacccaacttcaaagagttcaaatatccggaatcgtacacaaaggaaatcactggagggaatcgaattcagttgcagaataacatgtccatctttgatttggtaatcagtgaatagttgatccaccccttccacaagggcttttaagtcttcttcatttgcactgattccagtaggcaaggagatgtccatcaccgcatgagaggatccagatgatgattcttccctgctgggcttgtagctggcacatgctactatgcgtttgtaatcagagtttccgtagcctctgtagtgggatgcttcaatatcctgagtatcgattttcaaataaaagctgcaaacttcctcagaggtactggttttgtgaactacagttgttacatgtactgtagccaagccactgccaaatcctgtactgacaatgaggtcatcattgagaagcacctctactggcctcccaaggaaattcttgtctgtcattttataattatgtaaggcacctttatgcttgtaagaaacatcgatgtccatactcaagcggagttgtttaaccaggagtgaatattccgtcaggccctcaatggcattgattgtgtcctgggttgaataaaagccacctccatacctctgctcttctgatagccatttgatgactgggttaacataatttatatctttcaagttcagactggtgagtaaagcataggcagttgtttctaccatacgtgccgtaccagtgttaggtacagagctgtctttatgctgaagattgtctttccaaaaacgataaatgggtggattacctttaaccaaagcttctctcttcaaagctgaaacaattgaacgaaactgtgggtgagttttatctcccagggaaagagcatacgcagaaatggccaatgtaaaggtgctctgggctggcagtgtattttcaagcagaaagttgtcagctttaattagagctgtgtcgattttcaccagggggcatatatcgaaagcctttctaattccaatcacagtaaaggctgtaagatataagctgttctctcgggcttcaacaggcaaggtaccctgtaattttattggttgatactgtgaattttccttgaaagatccattatctaattgataattctcaactagccacaataaagaattacaaattgaattttggttctgctctacgtatttatttacttgtccaagtactcttaaagcaaaagctgttaaccaagtgctagcacttccacccttccacacactgtaagagtagtcagcatttctgtaggacataatgctcaacatcccttcttttaattttttcttcagtttctgcttttcaattaatgggtcagaatgaaaaatgttccaatgatttcctgtttccaggtagtgaaaaacatagaatactgggacaacgctcatcagctccgcctctgcactccctttggggaggtgggttaggatattgatgccttcctgacttagaactgcagacaagatctcacctacaagcagtccttttacactcaaaatccttttgatttctgttttggggaccaaatctaagggtatcctgtatgggaactcctttcgtctgctaatggtaccataaatacccctaggatccaaagtaacaccagaatagctttcccttttgacaccttctggcaccactcgtaatgtttttactaagatttcttttccaaaccaagtctccagtgaaaaattgatgttgtgaaggccaatttccagaggaagcacagtgaatgtcaccaagtgactggaggagccctctactttctggcgcacacatttggaggactttgtgccctgatgatcaatgactgggctttccgaagtgcagattccctccacagcagacattttaacacagaactgcatcccagaagtcctatagttgtaaacagttcctttcaattggatctgttctcctcgtacaacagaatatggtatattcatttccaggaagacatctttgaacacctttgccttgacagtatcagcaacacatataccagtgtttgaaatgccaacgccttgaatttcccaggtggttagagaatcaggtagggcaaactgcaactgttttcttctgggaacaagatgaacttcccacaaccagctttctggaaaataactccgaatttctggcttgcttactggtaacagggtcttcatgtgtagccttcccaattgcatgtctttatgagagatattagcacggagctggcttgcgacgacacaacattcagtgaaagctttgatgcatcttggccctaaactaatccgtgcagctcgctgctcacaggtttcatcattattaacgcaggctccatcgtaacaacatttcttcactactgaatgtttatatttagcagctatttcttctatcttcttttgcagcgttcttcttggcctgagaatttctttacaaggttcatcattttcttgggagtcatctgcatttgcattagtgaggaaggtaagtccagctaggtggaacacattggcattgttgaggccaccacctgccccacagcccagatcactcttctctaagaattgaaatactctttccaagggctttttggctcctctttggactccatacacagcactgtccactgctgctaatgccacccaggaatccattccagttgccatattaagagacacagtttggcctggagaatatgcatctgcatcaggagacagatgaacctggagctggttgccacatttttcttcaatatttaaccagactgaatcagacactaattctgctgtctgttctcctgtgacgatgtaatagaccagaagtcgggatgaaggaaccatgttctgtgttactggaatgtttatactttgataagatgcatctgaaaatttctccctcgtgccaaagtggataattttgcccttggataaaatcaagtaattatagtgagttattttgtcaatatatgggcttttgggggtaacaataatattcagatgttctcccactagcaaagccttatggttatcagtccaatcaatataaaggtaactttggctgagagatgagtatgctattgctcggtaaccttccctggcctgattttcttctggaagatctggagcatcagttttgacattaaactccagcaccgtcactccagatgggagattaagcacaaaggaagctactccatcatcaacacgtgttacacttttgcttggatccaagtcagatgtctcttggtttacatcaattgtttgtgcattcagtgttactgggactcctcctaccaactggtcaagcgaatctttaacctgcaccttgatgggatatggaatcccaggcttcaggaaaagaggagtagcaaccaaattcagtttgtagggagagaggacatatttgatgccaggtatttctgcctcttcagaaaatccacctgtagactctatgactgttacagcaatataaaggtacttgttgtttaaatcttctaaactgtagtatgacagttctttgactgctgtttcagaatcaaatgtgacttgagcaattccatttatcaacattgtgttttgcattgctgtttgcatcatttctttttgatcatcttttaagtcttctcttattccaaatgtgatataaacgtcagcctcagtgactactttattataaaaatatcttgcttttatagtaatttcaaaattcttaaagttcttgtaaccaatgaaattatattctggctcgattgagacagaaaaatgtggcaagacatattctttaacttcaaaatatgcggttccagttgttgaaaagtcctctttatatttagccttgatcgtccacataccatatctaggattagacggaatcttgaagtcaggaaaagagataattccaatatgatcaatttcttctaccatgtcaacttctgatccttcaggatctatgaaagttaagacagtttctcttttggctggcttcaagtcgtcattcaacgaataaactctaacttttactgactggtctggagtataaacaggtttgtctgtatgaatgaagagaaatccattgtcataggttattggcattctttttgattttgaaaaatgctttgatacaacttccaaatacacataagaaactgggttttgtcctccaggcaattgttttggttgtattgttaagattgcagagttttggaatttattctctgaggataaatgaacatggcctgaggagtaactaaattttttatcaggataacttttaatagagattgttgcatcaaatgcttcagtgtatccataaacttgaatcacaatattttcagatgctccaacacggaatatttttggtgctgaaatgacatatgtttgctcctgtccccaggttttccccaggaagattaaaaaacaaagtattcccaaaaggcccatggttggaggtagcaggaaaccacggatata

SEQ ID NO: 6 - DNA, 5384 bp, Macaca mulatta
  modified_base (2490)..(2509): a, c, t, g, unknown or other
tttttagcacagtttgaaagcaaactcaggctttaatgatcagtttcctgtcccctggtattttctttcaagcaaaggccatgtttttgtaatactccatttcaatggactgttctttcggctccagcaaacattcctaagtggtaggtttgaggaggtgttctaatttattgtttccggtgtccaataaccttggaggagtatctgtcttcatgccctccaaggccatgttatttcagaaagttacagcgtttaaaatcattctctaataaaagcaagtgccactaattctaagtaaagtgagctttacaaataagaccagctgtgaatgtttaaagacaaaaaaacgagaaaaaaaaacaaacttcaacaacaggagtccataagtgcaaactgtatgcagctgaacttcaggaattttagcatccatttaaaaagatgtcttcagcaaattcatctaaattagctaaaaatgcttgacacgatgaacatgttgtgtctctaggccagtattcaatccaggtcaaggaatctaaagggtagatgtacctgaaagtgaaattgtattttatctggagagcttctttccccataattaagtactgtcttcctttcaccagctcagcgttagtgcaggttacctttttaatgaaggtgatttcagagtctttttcagcaacagcttccccagttttgtagatatccagaagggttgccttgtacttgacaaaaacattttctgtagtgatggatgtgatgataactttataagcatatgcaatctctgggttacatgctgtttgttttctagtctctgcagagattgtcagatccaattctttctgcatttgcccacaatcagcttctatacacttgcacgtggctccttcacagactttctgaattttgatattggaagtgctataaaacatggtacactgtttatctggtctgtggtattcatacactgtgaaagtggcaggactaagaaacccaacttcaaagagttcaaaaatccggaatcgtacacaaaggaaatcactggaggggatcgaattcagttgcagaataacatgtccatcttttatttggtaatcagtgaatagctgatccaccccttccacaagagcttttaagtcttcttcatttgcattgattccagtaggcaaggagatgtccatcactgcatgagaggatccagaagatgattcttccttgctgggcttgtagctggcacatgctactatgcgtttgtaatcagagtttccgtagcctctgtagtgggatgcttcaatatcctgagtatcaattttcaaataaaagctgcaaacttcctcagaggtactggttttgtgaactacagttgttacatgtaccgtagccaagccactgccaaatcctgtactgacaacgaggtcatcattgagaagcacctctactggcctcccaaggaaattcttgtctgtcattttataattatgtaagggacctttatgcttgtaagcaacatcgatgtccatattcaagcggagctgtttaaccaggagtgaatattctgtcaggccctcgatggcattgattgtgtcctgggttgaataaaagccacctccatacctctgctcttctgatagccatttgatgattgggttaacataatttatgtctttcaagttcagactggtgagtaaagcataggcagttgtttctaccatacgtgctgtaccagtgttaggtacagagctgtctttatgttgaagactgtctttccaaaaacgataaatgggtggattacctttaaccaaagcttctctcttcaaagctgaaacaattgaacaaaactgtgggtgagttttatctcccagggaaagagcataggcagaaatggccaatgtaaaggtgctctgggctggcagtgtattttcaagcagaaaggtgtcagctttaattagagctgtgttgattttctgtaattttattggttgatactgtgaattttccttgaaggatccattatctaactgataattctcaaccagccacaataaagaattacatattgaattttggttctgctctacatatttatgtacttgtccaagtactcttaaagcaaaagctgttaaccaagtgctagcactgccacccttccacacgctgtaagaatagtcagcatttctgtaggacataatgctcaccatcccttcttttaattttttctccaggttccgcttttcaattaatgggtcggaatgaaaaatgttccaatgatttcctgtttccaggtagtgaaaaacatagaatactgggacaacgctcatcagctccgcctctgcactccctttggggaggtgggttaggatattgatgccttcccgacttagaactgcagacaagatctcacctacaagcagtccttttacactcaaaatccttttgatttctgttttggggaccaaatctaatggtatcctgtatgggaactcctttcgnnnnnnnnnnnnnnnnnnnncataaatacccctaggatccaaagtaataccagaatagctttcccttttgacaccttctggcaccactcgtaacgattttactaagatttcttttccaaacgaagtctccagtgagaaattgatgttctgaaggccaatttccagaggaagcacagtaaaggtcaccaagtgattagaggagccctctactttctgtcgcacacatttggaggactttgtgccctgatgatcaatgactgggctttctgaagtgcagattccctccacagcagacattttaacacagaactgcatcccagaagtcctatagttgtaaacagttcctttcaactggacctgttctcctcgtacaacagaatatggtatattcatttccaggaagacatctttgaacacctttgccttaatagtatcagcaacacatataccactgtttgaaatgccaacaccttgaatttcccaggtagttacagaatcaggtagggcaaactgcaactgttttcttctgggaacaagatgaacttcccataaccagctttctggaaaataactccgaatttctggcttgcttactggtaacagggtcttcatgtgtagccttcccaattgcaagtctttatgagagttattagcacggagctggcttgcgacgacacaacattcagtgaaagctttgacgcatctcggccctacactaatccgtgcagctcgctgctcacaggtttcatcatgattaatacggactccatcgtaacaacatttcttcactactaaatgtttatatttagcagctatttcttctatcttctcttgtagcattcttcttggcctgataatttctttacaaggttcatcattttcttgggagtcatctgcatttgcattagtgaggaaggtaagtccagctaggtggaacacattggcattgttgaggccaccacctgccccacagcccagatcactcttctctaagaattgaaatactctttccaagggctttttggctcttctttggactccatacacagcgctgtccactgctgttaatgccacccaggaatccatcccagttaccatattaagagacacagtttggcctggagaatatgtatctgcatcaggagacagatgaacctggagctggttgccacatttttcttcaatatttaaccagactgaatcagacactaattctgctgtctgctctcctgtgacgatgtaatagaccaggagtcgggatgaaggaaccatgttctgcgttactggaatgtttatactttgataagatgcatctgaaagtttctcccttgtgccaaagtggataattttgcccttggataaaatcaagtaattatagtgagttattttgtcaatatatgggcttttgggggtaacaataatattcaaatattctcccactagcaaagccttgtggttatcagtccaatcgatataaaggtaactttggctgagagatgagtatgctattgctcggtaaccttccctggcctgattttcgtctggaagatctggagcatcagttttgacattaaactccagcaccgtcactccagatgggagattaaccacaaacgaagctactccatcatcaacacgtgttacacttttccttggctccaagtcagatgtctcttggttgacatcaattgtttgtgcattcagtgttactgggacccctcctaccaactggtcaagcgcatctttaacctgcaccttgatggaatatggaatcccaggcttcaggaaaagaggagtagcaaccaaattcagtttgtagggagagaggacatatttgatgccaggtatttctgcctcttcagaaaatccacctgtagactctatgactgttacagcaatataaaggtacttgttgtttaaatcttctaaactgtagtatgacagttctttgactgctgtttcagaatcaaatgtgacttgagcaattccatttatcaacattgtgttttgcattgctgtttgcatcatttctttttgatcatcttttaagtcttctcttattccaaatgtgatataaacatcagcctcagtgactactttattataaaaatatcttgcttttatagtaatttcaaaattcttaaagttcttataaccaatgaaattactttctggttctactgagacagaaaaatgtggcaagacatattctttaacttcaaaaaatgcagttccagttgttgaaaagtcctctttatatttagcctggatcatccacataccatatctaggattagacggaatcttgaagtcaggaaaagagataattccaatatgatcaatttcttctaccatgtcaatttctgatccttcaggatctatgaaagttaagacagtttctcttttggctggcttcaagtcatcattcaacgaataaactctaacctttactgattggtctggagtataaacaggtttgtctgtatgaatgaagagaaatccattgtcataggttattggaattttttttgattttgaaaaatgctttgatacaacttccaaatacacataagaaacttggttttgtcctccaggtaattgttttggttgtattgttaagactgccgagttttggaatttattctctgaggataaatgaacatggcctgaggagtaactaaattttttatcaggataacttttaatagagattgttgcatcaaatgcttcagtgtatccataaacttgaatcacaatgttttcagatgctccaacacggaatatttttggtgctgaaatgacatatgtttgctcctgtccccaagtttttcccaggaagattaaaaaacaaagtattcccaaaaggcccatggttggaggtagcaggaaatcatg

SEQ ID NO: 7 - DNA, 5448 bp, Mus musculus
gagtgcaaagtcaagattttatggcattttctgtccttggtatttttctttcaagcaaggatatgttttgataaggggctacagtttcagtgggtctcttcttccggccccaaccaacacccctgactgctaactttacagacttgtttcagtctattggcactgacatctgatagccttgggggacctgttttcgcctcccctcaaggctatccatttcacaaagtcgtaactcatcagcttgtgctttactctaaagaaagtgtatctgattctaggctaggtttccaagccagaggaggagcaatccccccgccgcaggaggaatcttcgtgcagcagaacttttcattcacagctgtttaaaaagaggtcttcagcaaagttattcaaattctctacaaatgcttgacaggatggacacgttgtgtctgtgggccaatattcaatccaggtggaggaatctagagggtatatatacttgaaactgaaattgtgtttgatctgcagaacctctttgcccatgattaaatactgcttccctttcaccaggttggcattggtacagctcatctttttaatgaaggtgacctccgaattctcatcagcagcttcccctgttttgtaagtgaccagaagagtcgcagtgtacttgacaaaaacattttcttcagtggctgatgtgatcctgactttataagcatatgcagtctctggtttacaggctttctcttttctggagtctgcagagatggctaggtctacttctgcctgcagttgcgcacagtcagcttccacacatgtgcaagctgctccttcacagactttctgaagcctggtgtcagaaatgctataaatcatggtgcactgcttatctggtctgtgatactcgtacaccgtgaaggtagcaggattcagaaacccaacttggaaaagttcaaatatccggaaccggacacagaggaaatctctggaggggatcgaattcagttgcagaatgacatggccatctttgatctggtaatcagttagtagttgatccactccttccacaagagcccgtaaatcttcctcgtttgctccgattccagtcggcagtgatatatccattactgcatgggaggacccggatgttgactcctccttgctgggcttgtagctggcacatgctattatgcgcttgaatccagagtcactgagcctgaagtggctggatgcttcaatatcttgggtatcaattttcaagtaaaagctgcaaaattcctcagagacactaattttgtgaaccacagtttttacatatactgtggccaagccactgctgtagcctgtgctgacaacaaggtcatcattgagagatacctccactggcctccccaggaaatgcttctctgtcaccttatacttgtggaagtcaccttcgtgtttgtaggcgacattgatgtccatatccaaatgaatttgttttaacaggagtgaatattctgtcaggccctcgatggcattaatcgtatcctgggtggaataaaagccgcctccatacctctgctcttcagatagccacttgatgatggggttggcgtaattcatatccttcagtttcaggctggcgagcaaagcataggctgtggtttcaaccatacctgctgtgccgctgctgggcacagagctgtctggacgtttgagggtatctctccagtaacggtaaatgggcggatcacctttaacaaaagcttccttcctcagggccgacacaattagacgaaacctcgggtgggttctgtctcctagggaaagagcataggctacaatggccagtgtgaaggtgctcttggatggcagggtgttttcaagcaggaaggagtcggctttatctagcgctgtgtggattttcatggtggggcatatgtcaactgcctttctaattccaatcacagaaaaggctgtaagatacaaagttttctcttgggcttcagcaggcaaagtaccctgtaattttattggtagatattgggaattttccttgaaagagccgttttccagctgacacttctcaaccagccatagcaaagagttacaaattgagttttcatcctgttttacatacttggccacctgtccaagcactctcagagcaaaagctgtcagccaggtactagcgctcgcccccttccacatgctgtaggaatagtcagcgtttctgtaggacatgacgctcaccaccccttgttttatttttttctccaggctctgtcttttactcagtgtatcaggatagaaaatattccaatggtttcctgcttccaggtagtggaaaacatagaacaccggagctatgctcatgagctctgcctctgcactgcccttggggaggtgggttaggatgttgatgccttccttactcagaaccgtggacaagaactcccctacaagcagtcctttgacactcaaaatcctttcaactttggtcttggggaccaaatctaatgggatcctgtatgggaattcctttcgtctgttaacaataccacgaattcccttagggtccagaatcacgccggcatagctttccctcttgactccttctggcactacccgtaatgtctttactaagatgtctttcccaaatgaggtctctagtgagaagtttatggagtgaaggccaatttccagaggaagcagggtgaaggtcaccaagtgactggacgagccctctatcctctggaacacacatctggagggcctggaggtgtgaaggctagcagctgagcttcctgaagtgcagatcccctccacagcagacattttaacacagaactttgtccctgaggtcatatagttgtaaacagttcctttcaattggatctgttctcctcgcacaacagaatatggtatgttcatctccaggaagacttctttgaacacctttgccttgagtgtatcagcaacacatataccattgtctgaaatgccaatgccttgaatttcccaagtcgttagtgagtcaggcagcgtgacctgcagctgttttcttttgggaacgcgatgaatttcccatagccagctctctggaaagtagcttcggatatctgccttcatcactggtaacagggtcttaatgtggatccttcccagttggacaggtttatgggggctttcttttcggatcttgttcgcaatagtacagcactcgttgaaggccctgatgcagagagggcctatggtaacccgggccactcgctcctcacaggtttcgtagaagttcactcgggctccgtcatagcagcatttctttggcacactatgtttgtacttagcagcttgttcttctattttctgccttaggagatgcaggtttctctttgacctgagaatttctttacaagagtcatcacgataatgggagtcatctgcgtttgcgttggtgaggaaggtgagcccagctagatggaatacatctgcattgtcatggccaccacctgccccacagcccaggtcactcttttcatccaaagcttgaaagactctttgcatggcccttttggcgtttccctggactttatacacagctctgtccactgctgatagtgctacccatgagtctgcttcagtcaccatgtcaagggacacagtttggcctggagaatacacatattcatctggagacagatggacctggagctggttgccacacttctcctcaatatttatccagactgcgtcagccactaattctgctgtttgctcccctgtgactatgtaatagaccaggagtcgtgctgaaggaaccatgttctgtgtcactggaatatttatattttgataagttgaggagaaaagtttctctcttgtgccgtactgtacaattttgcctttggataaaatcaagtaattatagtgagttattttgtcgatatatgggctcttgggggtaaccataatattcaggtattctcccacaagcatgggcttgtagttttcagtccaagcgatgtaaatgtaactttggctgagagacgagtacgcaactgcttcgtactctttgctggcttgattttcttcgggaagttctgggtcatcagttctgatctcaaactttagcaccgtcacatttgatgggaggttcagcacaaacacagctactccatcagtgtcatgagtgatgctcctctttgtttccaagtcagatgtctcttgattcacatcgactgtttgtgccatcagagttactgggacccctcctaccgcctgctcgagtgaatctttaacctgtgccttgatggaaaatggaatcccgggcttcacgaaaagaggagtagcgaccaaattcagtgtgtagggagagaggacatatttgactccagggatttctgcctcttctgaaaatccacctgaagattctgtgactgttactgcaatataaaggtacttgttgtttaagtcttctagactgttgtaggacagctctttaactgctgtttcagaatcaaaagagatctgagcaactccgtcaaccaactttgcggcttgtgtggctttgtgcatcatctgcttctcctcatcttttatgtcctctctcaatccaaaaaaggcatacacttcagcatcaggtaccactttattataaaaatatcttgctttcacagtgatttcaaagttcttaaagtttttatagccaatgaaggttctttctagttctattgaaacagagaatcgtggcaagacatattctttaatttcaaagtatgcagttccagttgttgtaaaatccttcttatagttagctttaattgtccaaacaccatacttgggattagatggaatcttgaagtcaggaaaagagataattccggtgtaatcattttcttctacaatgtcaacttctgatccttcggggtctatgaaagttaagacagtctcccgtttggctggcttcaagtcgtcacccagagaatagactctgatctttactgactggtccggcgtgtaaacaggtttgtctgtatggatgaagagaattccattgttataggtaattggtattttctttgattttgaaaagtgttttgacacaacttccagatacacgtgagagactgggctttcttctctaggaacttgattgggctgtagtgtcaacagtgccgcgttttggaatttgttttccggggacaaattaacatagcctgaagagaaggtgacttttttgtcaggatagctttttagagaaagagttgcatcaaatgcttcagtgtagccatggacttgaattaccacattttcagacgagccgacccggaggattttgggtgctgaaatgacgtaggtttgttcctgtccccaagttttgtccaggaaaattaaaagacaaagtattccccaaagacccatggctggtagcggcataaacccatgggcatggcctccctgtaaccactttccttttaaa

SEQ ID NO: 8 - DNA, 4497 bp, Rattus norvegicus
tacagttgagtgcaaagtcaagcttttatggcattttctgtccttggtattttttttttcaagcaagaccatgttttcctaaggggctacaatttcagtgagtctcttcttccggccccaacaaacacccctggctgctaacgttacagacttgttccagcttattggtgctgatgtccaatagccttgggggacctgccttcggctctccacaaggctattttgtttcacaaagtaactcttcaacttacgctttactataaagaaaatgtatccgattctaggctaagtttccaagcgatcctggctcctaggagccaccaacaggagtacccgggaaggccacgcagcagaacttcctcaggcattttcacagccatttagaaagatgtcttcagcgaactcgtccaaattagctacaaacgcttggcaggatggacacgttgtgtctgtgggccaatattcaatccaggtggaggaatctagagggtatatatacttgaaactgaaattgtgtttgatctgcagagcctctttgcccatgattaaatattgctttcctttcaccaggttggcgttggtacagcttatctttttaatgaaggtgatctcagagtccttctcagcagcggcttcccctgttttgtaaatatccagaagcgtcgcagtgtacttgacaaaaatgttttcttccgtggccgacgtgatcctgaccttataagcatatgcaatctctggtttacatgctgtttctttcctggtgtctgcagagatggccaggtccagttctgcctgcagttgcccacaatcagcttcaacgcatttgcatgccgctccttcacagactctctgaaggttggtgtcagaagtgctgtaaatcatggtacactgcttatctggtctgtgatactcgtacaccgtgaacgtagcaggattcagaaacccaacttggaaaagttcaaatatccggaaccgaacacaaaggaaatctctggagggaatcgaattcaattgcagaataacatgactgtctttgatctggtaatcagttaggagttgatctactccttccacaagagctcgtaaatcttcttggtttgctccgattccggtcggcagcagtatatccattactgcatgggaggacccagatgctgactcctccttgctgggcttgtagctggcacaggctattatgcgcttgtgtcccgagtcactgtagctgaggtagctggaggcttcaacttcttgggtatcaattttcaagtaaaagctgcaaaattcctcagcgacactagttttgtgaaccacagtttttacatatactgtagccaagccactgctatagcctgtggtgacgatgaggtcatcattgaggggtacctccactggcctcccgaggaagttcttctctgtcactttatactggtagaaatcccctttgtgtttgtaggagacattgatatccatatccaaatgaagttgtttaaccaggagtgaatactctgtcaggccctcgatggcgttaatggtatcctgggtggaataaaagccgcctccatacctctgctcctcagatagccacttgatgatcgggttgacataactcgtctccttcaggttcaggctggtgagcaaagcataggccgtggtttctaccatacctgctgtgccgctgttgggtgctgagctgtctggacgttggagagtgtctctccagaaacggtaaatgggcgggtctcctttaaccaaagcttccctcttcagggctgacacaatagaacgaaacttcgggtgggttctgtctcccagggagagagcataggccacaatggccagggtgaaggtgctcttggaaggcagggtcctttcaagtaggaaggagtcagctttagccagcgctgtgtagattttctccgtggggcatatgccaatagcctttctaattccaatcacagaaaaggctgtaagatataaagtgttctcttgggcttcagcaggcaaagtaccctgtaattttattggtagatattgggaattttccttgaaagatccgttttccagctgacacttctcaatcagccataacaaggagttacagatcgagtattggtcttgtttcacatacttgttcacctgtccaagcactctcagagcaaaagctgtcagccaggcactagagcttgctcccttccacatgctgtaggaatagtcagcgtttctgtaggacatgacgctcaccagcccttcttttatttttttctgcaggctctgttttctagctaacgtatcagggtggaaaatattccaatggtttcctgcttccaggtagtggaaaacgtagaacaccgggactatgctcatgagttctgcctcggcgctgcccttggggaggtgggttaggatgtcgatgccttctttactcagaaccgtggacaagaattcccctataagcagtccttttacactcaaaatccttttgacgttggttttggggaccaaatctaatggtatcctgtatgggaattcctttcgtctgttaacaataccataaactcccctggggtccagagtcacaccagcatagctttcccttttgatcccttctggcactacccgtaatgtcttcactaagatttctttcccaaatgaagtctctagtgagaagtttatggagtgaaggccaatttccagaggaagcaggctgaaggtcaccaagtgactggaggagccctctattctctggcgcacacatctggaggacctagaggtctgagggctagcagccgagcttcctggagtgcagattccctccacggcagacattttaacacagaacattgtcccagaggtcctataattgtaaacggttcccttcaattggatctgctcccctcgtacaacagaatatggtatgttcatctccaggaagacatctttgaacacctttgccttgagtgtgtcagcaacacatataccattgtctgagatgccgatgccttgaatttcccaggtcgtcagtgagtcaggcagtgcaacctgcagctggtttcttttgggaacacgatgaacttcccatagccagctctctggaaagtagcttcggatttctgccttcatcactggtaacagggcctttatttggatccttcccaacagcatgcctttgtggtggctttcttttcggatcttatccgcaatagtacaacactcgttgaaggccctgatgcagtgtgggcctatggtcacccgggcaactcgctgctcacaggtttcgtatttgttttctcgggctccatcataacagcatttcttgggcacacggtgtttgtatttagcagcttgttcttccactttctgatgcaggagctgcaggtctctctttggcctgagaatttccttacaagagtcatcgtggtattgggagtcatctgcgtttgcattggtgaggaaggtgagcccagctagatggaatacatctacattgtcacggccaccacctgccccacagcccaggtcactcttgtcatcaaaagcttggaacactctttgcatggcccttttggcttttccccggactccatacacagcgctgtccaccgcagatagtgccacccatgagtctgcttcagtcaccatgtcaagggacacagtttggcctggagaatacacgtctttatctggagacagatggacctggagctggttgccacacttctcctcaatgtttatccagactgcgtcagccaccaattctgctgtctgctcccccgtgactatgtaatagaccaggagccgcgctgaaggaaccatgtcctgtgtcactgggatgtttatattttgataagatgaatagagaagtttctcctttgtgccatactgtacaattttgcctttggataaaatcaagtaattatagtgagttattttgtcaatatatggactcttgggggtgacgataatattcagatattctcccacaagcatgggcttgtagttttcagtccagccaatgtaaatgtaactctggctgagggatgagtatgtaactgcttcatattctttgctggcttgattttcttcgggaagttccggggcatcagttttgacctcaaacttcagtgatgtcacttctgatgggaggttcaccacaaatgaagccactccatcagcagagtgtgtgatgctcctctttggttccaagtcagatgtctcttgattcacattgactgtttgtgccatcagagttactgggacccctcctaccaactgctcgagtgaatccttaacctgtaccttgatggaaaatggaatcccaggcttcaggaaaagaggggtagcgaccaaattcagtgtatagggagagaggacgtatttgatgccaggaatttctgcctcttccgaaaacccacctacaagggcagcaagcactgagttaatgtttccggaaagatgatggcgggctgtaggacatctgtcggtctctgtgctatccat

SEQ ID NO: 9 - protein, 16 aa, Unknown
  source: /note="Description of Unknown: RFGF peptide"
AAVALLPAVLLALLAP

SEQ ID NO: 10 - protein, 11 aa, Unknown
  source: /note="Description of Unknown: RFGF analogue peptide"
AALLPVLLAAP

SEQ ID NO: 11 - protein, 13 aa, Human immunodeficiency virus
GRKKRRQRRRPPQ

SEQ ID NO: 12 - protein, 16 aa, Drosophila sp.
RQIKIWFQNRRMKWKK

SEQ ID NO: 13 - DNA, 21 bp, Artificial Sequence
  source: /note="Description of Artificial Sequence: Synthetic oligonucleotide"
  source: /note="Description of Combined DNA/RNA Molecule: Synthetic oligonucleotide"
cuuacgcugaguacuucgatt

SEQ ID NO: 14 - DNA, 21 bp, Artificial Sequence
  source: /note="Description of Artificial Sequence: Synthetic oligonucleotide"
  source: /note="Description of Combined DNA/RNA Molecule: Synthetic oligonucleotide"
ucgaaguacucagcguaagtt

SEQ ID NO: 15 - RNA, 21 nt, Artificial Sequence
  source: /note="Description of Artificial Sequence: Synthetic oligonucleotide"
aauaacucacuauaauuacuu

SEQ ID NO: 16 - RNA, 21 nt, Artificial Sequence
  source: /note="Description of Artificial Sequence: Synthetic oligonucleotide"
ugacaaaauaacucacuauaa

SEQ ID NO: 17 - RNA, 21 nt, Artificial Sequence
  source: /note="Description of Artificial Sequence: Synthetic oligonucleotide"
cuuccucuggaaauuggccuu

SEQ ID NO: 18 - RNA, 21 nt, Artificial Sequence
  source: /note="Description of Artificial Sequence: Synthetic oligonucleotide"
gacaaaauaacucacuauaau

SEQ ID NO: 19 - RNA, 21 nt, Artificial Sequence
  source: /note="Description of Artificial Sequence: Synthetic oligonucleotide"
uccucuggaaauuggccuuca

SEQ ID NO: 20 - RNA, 21 nt, Artificial Sequence
  source: /note="Description of Artificial Sequence: Synthetic oligonucleotide"
aagcaagauauuuuuauaaua

SEQ ID NO: 21 - RNA, 21 nt, Artificial Sequence
  source: /note="Description of Artificial Sequence: Synthetic oligonucleotide"
aaaauguuuuugucaaguaca

SEQ ID NO: 22 - RNA, 21 nt, Artificial Sequence
  source: /note="Description of Artificial Sequence: Synthetic oligonucleotide"
auuuaaacaacaaguaccuuu

SEQ ID NO: 23 - RNA, 21 nt, Artificial Sequence
  source: /note="Description of Artificial Sequence: Synthetic oligonucleotide"
auucagaaagucugugaagga

SEQ ID NO: 24 - RNA, 21 nt, Artificial Sequence
  source: /note="Description of Artificial Sequence: Synthetic oligonucleotide"
acacugaagcauuugaugcaa

SEQ ID NO: 25 - RNA, 21 nt, Artificial Sequence
  source: /note="Description of Artificial Sequence: Synthetic oligonucleotide"
gcaguucuguguuaaaauguc

SEQ ID NO: 26 - RNA, 21 nt, Artificial Sequence
  source: /note="Description of Artificial Sequence: Synthetic oligonucleotide"
aggauuuugaguguaaaagga

SEQ ID NO: 27 - RNA, 21 nt, Artificial Sequence
  source: /note="Description of Artificial Sequence: Synthetic oligonucleotide"
aaugaugaaccuuguaaagaa

SEQ ID NO: 28 - RNA, 21 nt, Artificial Sequence
  source: /note="Description of Artificial Sequence: Synthetic oligonucleotide"
aucauuggaacauuuuucauu

SEQ ID NO: 29 - RNA, 21 nt, Artificial Sequence
  source: /note="Description of Artificial Sequence: Synthetic oligonucleotide"
agccagaaauucggaguuauu

SEQ ID NO: 30 - RNA, 21 nt, Artificial Sequence
  source: /note="Description of Artificial Sequence: Synthetic oligonucleotide"
ucccugggagauaaaacucac

SEQ ID NO: 31 - RNA, 21 nt, Artificial Sequence
  source: /note="Description of Artificial Sequence: Synthetic oligonucleotide"
gaaaaugaugaaccuuguaaa

SEQ ID NO: 32 - RNA, 21 nt, Artificial Sequence
  source: /note="Description of Artificial Sequence: Synthetic oligonucleotide"
auugcucaagucacauuugau

SEQ ID NO: 33 - RNA, 21 nt, Artificial Sequence
  source: /note="Description of Artificial Sequence: Synthetic oligonucleotide"
gagauugcauaugcuuauaaa

SEQ ID NO: 34 - RNA, 21 nt, Artificial Sequence
  source: /note="Description of Artificial Sequence: Synthetic oligonucleotide"
guuauccugauaaaaaauuua

SEQ ID NO: 35 - RNA, 21 nt, Artificial Sequence
  source: /note="Description of Artificial Sequence: Synthetic oligonucleotide"
aggaaguuugcagcuuuuauu

SEQ ID NO: 36 - RNA, 21 nt, Artificial Sequence
  source: /note="Description of Artificial Sequence: Synthetic oligonucleotide"
gaagaaauugaucauauugga

SEQ ID NO: 37 - RNA, 21 nt, Artificial Sequence
  source: /note="Description of Artificial Sequence: Synthetic oligonucleotide"
auccugauaaaaaauuuaguu

SEQ ID NO: 38 - RNA, 21 nt, Artificial Sequence
  source: /note="Description of Artificial Sequence: Synthetic oligonucleotide"
uggaaaagaaaucuuaguaaa

SEQ ID NO: 39 - RNA, 21 nt, Artificial Sequence
  source: /note="Description of Artificial Sequence: Synthetic oligonucleotide"
ucuuaucaaaguauaaacauu

SEQ ID NO: 40 - RNA, 21 nt, Artificial Sequence
  source: /note="Description of Artificial Sequence: Synthetic oligonucleotide"
ucccuacaaacugaauuuggu

SEQ ID NO: 41 - RNA, 21 nt, Artificial Sequence
  source: /note="Description of Artificial Sequence: Synthetic oligonucleotide"
caggagcaaacauaugucauu

SEQ ID NO: 42 - RNA, 21 nt, Artificial Sequence
  source: /note="Description of Artificial Sequence: Synthetic oligonucleotide"
acauguaacaacuguaguuca

SEQ ID NO: 43 - RNA, 21 nt, Artificial Sequence
  source: /note="Description of Artificial Sequence: Synthetic oligonucleotide"
caggaaaucauuggaacauuu

SEQ ID NO: 44 - RNA, 21 nt, Artificial Sequence
  source: /note="Description of Artificial Sequence: Synthetic oligonucleotide"
uuuaagaauuuugaaauuacu

SEQ ID NO: 45 - RNA, 21 nt, Artificial Sequence
  source: /note="Description of Artificial Sequence: Synthetic oligonucleotide"
uauucugcaacugaauucgau

SEQ ID NO: 46 - RNA, 21 nt, Artificial Sequence
  source: /note="Description of Artificial Sequence: Synthetic oligonucleotide"
gcccuuggaaagaguauuuca

SEQ ID NO: 47 - RNA, 21 nt, Artificial Sequence
  source: /note="Description of Artificial Sequence: Synthetic oligonucleotide"
ccugauaaaaaauuuaguuac

SEQ ID NO: 48 - RNA, 21 nt, Artificial Sequence
  source: /note="Description of Artificial Sequence: Synthetic oligonucleotide"
cccuuggaaagaguauuucaa

SEQ ID NO: 49 - RNA, 21 nt, Artificial Sequence
  source: /note="Description of Artificial Sequence: Synthetic oligonucleotide"
ugcagaucaaacacaauuuca

SEQ ID NO: 50 - RNA, 21 nt, Artificial Sequence
  source: /note="Description of Artificial Sequence: Synthetic oligonucleotide"
cagaucaaacacaauuucagu

SEQ ID NO: 51 - RNA, 21 nt, Artificial Sequence
  source: /note="Description of Artificial Sequence: Synthetic oligonucleotide"
guuccggauauuugaacuuuu

SEQ ID NO: 52 - RNA, 21 nt, Artificial Sequence
  source: /note="Description of Artificial Sequence: Synthetic oligonucleotide"
auuuaaacaacaaguaccuuu

SEQ ID NO: 53 - RNA, 21 nt, Artificial Sequence
  source: /note="Description of Artificial Sequence: Synthetic oligonucleotide"
auuuaaacaacaaguaccuuu

SEQ ID NO: 54 - RNA, 21 nt, Artificial Sequence
  source: /note="Description of Artificial Sequence: Synthetic oligonucleotide"
ugacaaaauaacucacuauaa

SEQ ID NO: 55 - RNA, 21 nt, Artificial Sequence
  source: /note="Description of Artificial Sequence: Synthetic oligonucleotide"
ugacaaaauaacucacuauaa

SEQ ID NO: 56 - RNA, 21 nt, Artificial Sequence
  source: /note="Description of Artificial Sequence: Synthetic oligonucleotide"
gacaaaauaacucacuauaau

SEQ ID NO: 57 - RNA, 21 nt, Artificial Sequence
  source: /note="Description of Artificial Sequence: Synthetic oligonucleotide"
gacaaaauaacucacuauaau

SEQ ID NO: 58 - RNA, 21 nt, Artificial Sequence
  source: /note="Description of Artificial Sequence: Synthetic oligonucleotide"
guuccggauauuugaacuuuu

SEQ ID NO: 59 - RNA, 21 nt, Artificial Sequence
  source: /note="Description of Artificial Sequence: Synthetic oligonucleotide"
guuccggauauuugaacuuuu

SEQ ID NO: 60 - RNA, 21 nt, Artificial Sequence
  source: /note="Description of Artificial Sequence: Synthetic oligonucleotide"
ugcagaucaaacacaauuuca

SEQ ID NO: 61 - RNA, 21 nt, Artificial Sequence
  source: /note="Description of Artificial Sequence: Synthetic oligonucleotide"
ugcagaucaaacacaauuuca

SEQ ID NO: 62 - RNA, 21 nt, Artificial Sequence
  source: /note="Description of Artificial Sequence: Synthetic oligonucleotide"
aagcaagauauuuuuauaaua

SEQ ID NO: 63 - RNA, 21 nt, Artificial Sequence
  source: /note="Description of Artificial Sequence: Synthetic oligonucleotide"
aagcaagauauuuuuauaaua

SEQ ID NO: 64 - RNA, 21 nt, Artificial Sequence
  source: /note="Description of Artificial Sequence: Synthetic oligonucleotide"
cagaucaaacacaauuucagu

SEQ ID NO: 65 - RNA, 21 nt, Artificial Sequence
  source: /note="Description of Artificial Sequence: Synthetic oligonucleotide"
cagaucaaacacaauuucagu

SEQ ID NO: 66 - RNA, 23 nt, Artificial Sequence
  source: /note="Description of Artificial Sequence: Synthetic oligonucleotide"
aaguaauuauagugaguuauuuu

SEQ ID NO: 67 - RNA, 23 nt, Artificial Sequence
  source: /note="Description of Artificial Sequence: Synthetic oligonucleotide"
uuauagugaguuauuuugucaau

SEQ ID NO: 68 - RNA, 23 nt, Artificial Sequence
  source: /note="Description of Artificial Sequence: Synthetic oligonucleotide"
aaggccaauuuccagaggaagca

SEQ ID NO: 69 - RNA, 23 nt, Artificial Sequence
  source: /note="Description of Artificial Sequence: Synthetic oligonucleotide"
auuauagugaguuauuuugucaa

SEQ ID NO: 70 - RNA, 23 nt, Artificial Sequence
  source: /note="Description of Artificial Sequence: Synthetic oligonucleotide"
ugaaggccaauuuccagaggaag

SEQ ID NO: 71 - RNA, 23 nt, Artificial Sequence
  source: /note="Description of Artificial Sequence: Synthetic oligonucleotide"
uauuauaaaaauaucuugcuuuu

SEQ ID NO: 72 - RNA, 23 nt, Artificial Sequence
  source: /note="Description of Artificial Sequence: Synthetic oligonucleotide"
uguacuugacaaaaacauuuucu

SEQ ID NO: 73 - RNA, 23 nt, Artificial Sequence
  source: /note="Description of Artificial Sequence: Synthetic oligonucleotide"
aaagguacuuguuguuuaaaucu

SEQ ID NO: 74 - RNA, 23 nt, Artificial Sequence
  source: /note="Description of Artificial Sequence: Synthetic oligonucleotide"
uccuucacagacuuucugaauuu

SEQ ID NO: 75 - RNA, 23 nt, Artificial Sequence
  source: /note="Description of Artificial Sequence: Synthetic oligonucleotide"
uugcaucaaaugcuucaguguau

SEQ ID NO: 76 - RNA, 23 nt, Artificial Sequence
  source: /note="Description of Artificial Sequence: Synthetic oligonucleotide"
gacauuuuaacacagaacugcau

SEQ ID NO: 77 - RNA, 23 nt, Artificial Sequence
  source: /note="Description of Artificial Sequence: Synthetic oligonucleotide"
uccuuuuacacucaaaauccuuu

SEQ ID NO: 78 - RNA, 23 nt, Artificial Sequence
  source: /note="Description of Artificial Sequence: Synthetic oligonucleotide"
uucuuuacaagguucaucauuuu

SEQ ID NO: 79 - RNA, 23 nt, Artificial Sequence
  source: /note="Description of Artificial Sequence: Synthetic oligonucleotide"
aaugaaaaauguuccaaugauuu

SEQ ID NO: 80 - RNA, 23 nt, Artificial Sequence
  source: /note="Description of Artificial Sequence: Synthetic oligonucleotide"
aauaacuccgaauuucuggcuug

SEQ ID NO: 81 - RNA, 23 nt, Artificial Sequence
  source: /note="Description of Artificial Sequence: Synthetic oligonucleotide"
gugaguuuuaucucccagggaaa

SEQ ID NO: 82 - RNA, 23 nt, Artificial Sequence
  source: /note="Description of Artificial Sequence: Synthetic oligonucleotide"
uuuacaagguucaucauuuucuu

SEQ ID NO: 83 - RNA, 23 nt, Artificial Sequence
  source: /note="Description of Artificial Sequence: Synthetic oligonucleotide"
aucaaaugugacuugagcaauuc

SEQ ID NO: 84 - RNA, 23 nt, Artificial Sequence
  source: /note="Description of Artificial Sequence: Synthetic oligonucleotide"
uuuauaagcauaugcaaucucug

SEQ ID NO: 85 - RNA, 23 nt, Artificial Sequence
  source: /note="Description of Artificial Sequence: Synthetic oligonucleotide"
uaaauuuuuuaucaggauaacuu

SEQ ID NO: 86 - RNA, 23 nt, Artificial Sequence
  source: /note="Description of Artificial Sequence: Synthetic oligonucleotide"
aauaaaagcugcaaacuuccuca

SEQ ID NO: 87 - RNA, 23 nt, Artificial Sequence
  source: /note="Description of Artificial Sequence: Synthetic oligonucleotide"
uccaauaugaucaauuucuucua

SEQ ID NO: 88 - RNA, 23 nt, Artificial Sequence
  source: /note="Description of Artificial Sequence: Synthetic oligonucleotide"
aacuaaauuuuuuaucaggauaa

SEQ ID NO: 89 - RNA, 23 nt, Artificial Sequence
  source: /note="Description of Artificial Sequence: Synthetic oligonucleotide"
uuuacuaagauuucuuuuccaaa

SEQ ID NO: 90 - RNA, 23 nt, Artificial Sequence
  source: /note="Description of Artificial Sequence: Synthetic oligonucleotide"
aauguuuauacuuugauaagaug

SEQ ID NO: 91 - RNA, 23 nt, Artificial Sequence
  source: /note="Description of Artificial Sequence: Synthetic oligonucleotide"
accaaauucaguuuguagggaga

SEQ ID NO: 92 - RNA, 23 nt, Artificial Sequence
  source: /note="Description of Artificial Sequence: Synthetic oligonucleotide"
aaugacauauguuugcuccuguc

SEQ ID NO: 93 - RNA, 23 nt, Artificial Sequence
  source: /note="Description of Artificial Sequence: Synthetic oligonucleotide"
ugaacuacaguuguuacauguac

SEQ ID NO: 94 - RNA, 23 nt, Artificial Sequence
  source: /note="Description of Artificial Sequence: Synthetic oligonucleotide"
aaauguuccaaugauuuccuguu

SEQ ID NO: 95 - RNA, 23 nt, Artificial Sequence
  source: /note="Description of Artificial Sequence: Synthetic oligonucleotide"
aguaauuucaaaauucuuaaagu

SEQ ID NO: 96 - RNA, 23 nt, Artificial Sequence
  source: /note="Description of Artificial Sequence: Synthetic oligonucleotide"
aucgaauucaguugcagaauaac

SEQ ID NO: 97 - RNA, 23 nt, Artificial Sequence
  source: /note="Description of Artificial Sequence: Synthetic oligonucleotide"
ugaaauacucuuuccaagggcuu

SEQ ID NO: 98 - RNA, 23 nt, Artificial Sequence
  source: /note="Description of Artificial Sequence: Synthetic oligonucleotide"
guaacuaaauuuuuuaucaggau

SEQ ID NO: 99 - RNA, 23 nt, Artificial Sequence
  source: /note="Description of Artificial Sequence: Synthetic oligonucleotide"
uugaaauacucuuuccaagggcu

SEQ ID NO: 100 - RNA, 23 nt, Artificial Sequence
  source: /note="Description of Artificial Sequence: Synthetic oligonucleotide"
ugaaauuguguuugaucugcaga

SEQ ID NO: 101 - RNA, 23 nt, Artificial Sequence
  source: /note="Description of Artificial Sequence: Synthetic oligonucleotide"
acugaaauuguguuugaucugca

SEQ ID NO: 102 - RNA, 23 nt, Artificial Sequence
  source: /note="Description of Artificial Sequence: Synthetic oligonucleotide"
aaaaguucaaauauccggaaccg

SEQ ID NO: 103 - RNA, 23 nt, Artificial Sequence
  source: /note="Description of Artificial Sequence: Synthetic oligonucleotide"
aaagguacuuguuguuuaaaucu

SEQ ID NO: 104 - RNA, 23 nt, Artificial Sequence
  source: /note="Description of Artificial Sequence: Synthetic oligonucleotide"
aaagguacuuguuguuuaaaucu

SEQ ID NO: 105 - RNA, 23 nt, Artificial Sequence
  source: /note="Description of Artificial Sequence: Synthetic oligonucleotide"
uuauagugaguuauuuugucaau

SEQ ID NO: 106 - RNA, 23 nt, Artificial Sequence
  source: /note="Description of Artificial Sequence: Synthetic oligonucleotide"
uuauagugaguuauuuugucaau

SEQ ID NO: 107 - RNA, 23 nt, Artificial Sequence
  source: /note="Description of Artificial Sequence: Synthetic oligonucleotide"
auuauagugaguuauuuugucaa

SEQ ID NO: 108 - RNA, 23 nt, Artificial Sequence
  source: /note="Description of Artificial Sequence: Synthetic oligonucleotide"
auuauagugaguuauuuugucaa

SEQ ID NO: 109 - RNA, 23 nt, Artificial Sequence
  source: /note="Description of Artificial Sequence: Synthetic oligonucleotide"
aaaaguucaaauauccggaaccg

SEQ ID NO: 110 - RNA, 23 nt, Artificial Sequence
  source: /note="Description of Artificial Sequence: Synthetic oligonucleotide"
aaaaguucaaauauccggaaccg

SEQ ID NO: 111 - RNA, 23 nt, Artificial Sequence
  source: /note="Description of Artificial Sequence: Synthetic oligonucleotide"
ugaaauuguguuugaucugcaga

SEQ ID NO: 112 - RNA, 23 nt, Artificial Sequence
  source: /note="Description of Artificial Sequence: Synthetic oligonucleotide"
ugaaauuguguuugaucugcaga

SEQ ID NO: 113 - RNA, 23 nt, Artificial Sequence
  source: /note="Description of Artificial Sequence: Synthetic oligonucleotide"
uauuauaaaaauaucuugcuuuu

SEQ ID NO: 114 - RNA, 23 nt, Artificial Sequence
  source: /note="Description of Artificial Sequence: Synthetic oligonucleotide"
uauuauaaaaauaucuugcuuuu

SEQ ID NO: 115 - RNA, 23 nt, Artificial Sequence
  source: /note="Description of Artificial Sequence: Synthetic oligonucleotide"
acugaaauuguguuugaucugca

SEQ ID NO: 116 - RNA, 23 nt, Artificial Sequence
  source: /note="Description of Artificial Sequence: Synthetic oligonucleotide"
acugaaauuguguuugaucugca

SEQ ID NO: 117 - RNA, 21 nt, Artificial Sequence
  source: /note="Description of Artificial Sequence: Synthetic oligonucleotide"
aauaacucacuauaauuacuu

SEQ ID NO: 118 - RNA, 21 nt, Artificial Sequence
  source: /note="Description of Artificial Sequence: Synthetic oligonucleotide"
ugacaaaauaacucacuauaa

SEQ ID NO: 119 - RNA, 21 nt, Artificial Sequence
  source: /note="Description of Artificial Sequence: Synthetic oligonucleotide"
cuuccucuggaaauuggccuu

SEQ ID NO: 120 - RNA, 21 nt, Artificial Sequence
  source: /note="Description of Artificial Sequence: Synthetic oligonucleotide"
gacaaaauaacucacuauaau

SEQ ID NO: 121 - RNA, 21 nt, Artificial Sequence
  source: /note="Description of Artificial Sequence: Synthetic oligonucleotide"
uccucuggaaauuggccuuca

SEQ ID NO: 122 - RNA, 21 nt, Artificial Sequence
  source: /note="Description of Artificial Sequence: Synthetic oligonucleotide"
aagcaagauauuuuuauaaua

SEQ ID NO: 123 - RNA, 21 nt, Artificial Sequence
  source: /note="Description of Artificial Sequence: Synthetic oligonucleotide"
aaaauguuuuugucaaguaca

SEQ ID NO: 124 - RNA, 21 nt, Artificial Sequence
  source: /note="Description of Artificial Sequence: Synthetic oligonucleotide"
auuuaaacaacaaguaccuuu

SEQ ID NO: 125 - RNA, 21 nt, Artificial Sequence
  source: /note="Description of Artificial Sequence: Synthetic oligonucleotide"
auucagaaagucugugaagga

SEQ ID NO: 126 - RNA, 21 nt, Artificial Sequence
  source: /note="Description of Artificial Sequence: Synthetic oligonucleotide"
acacugaagcauuugaugcaa

SEQ ID NO: 127 - RNA, 21 nt, Artificial Sequence
  source: /note="Description of Artificial Sequence: Synthetic oligonucleotide"
gcaguucuguguuaaaauguc

SEQ ID NO: 128 - RNA, 21 nt, Artificial Sequence
  source: /note="Description of Artificial Sequence: Synthetic oligonucleotide"
aggauuuugaguguaaaagga

SEQ ID NO: 129 - RNA, 21 nt, Artificial Sequence
  source: /note="Description of Artificial Sequence: Synthetic oligonucleotide"
aaugaugaaccuuguaaagaa

SEQ ID NO: 130 - RNA, 21 nt, Artificial Sequence
  source: /note="Description of Artificial Sequence: Synthetic oligonucleotide"
aucauuggaacauuuuucauu

SEQ ID NO: 131 - RNA, 21 nt, Artificial Sequence
  source: /note="Description of Artificial Sequence: Synthetic oligonucleotide"
agccagaaauucggaguuauu

SEQ ID NO: 132 - RNA, 21 nt, Artificial Sequence
  source: /note="Description of Artificial Sequence: Synthetic oligonucleotide"
ucccugggagauaaaacucac

SEQ ID NO: 133 - RNA, 21 nt, Artificial Sequence
  source: /note="Description of Artificial Sequence: Synthetic oligonucleotide"
gaaaaugaugaaccuuguaaa

SEQ ID NO: 134 - RNA, 21 nt, Artificial Sequence
  source: /note="Description of Artificial Sequence: Synthetic oligonucleotide"
auugcucaagucacauuugau

SEQ ID NO: 135 - RNA, 21 nt, Artificial Sequence
  source: /note="Description of Artificial Sequence: Synthetic oligonucleotide"
gagauugcauaugcuuauaaa

SEQ ID NO: 136 - RNA, 21 nt, Artificial Sequence
  source: /note="Description of Artificial Sequence: Synthetic oligonucleotide"
guuauccugauaaaaaauuua

SEQ ID NO: 137 - RNA, 21 nt, Artificial Sequence
  source: /note="Description of Artificial Sequence: Synthetic oligonucleotide"
aggaaguuugcagcuuuuauu

SEQ ID NO: 138 - RNA, 21 nt, Artificial Sequence
  source: /note="Description of Artificial Sequence: Synthetic oligonucleotide"
gaagaaauugaucauauugga

SEQ ID NO: 139 - RNA, 21 nt, Artificial Sequence
  source: /note="Description of Artificial Sequence: Synthetic oligonucleotide"
auccugauaaaaaauuuaguu

SEQ ID NO: 140 - RNA, 21 nt, Artificial Sequence
  source: /note="Description of Artificial Sequence: Synthetic oligonucleotide"
uggaaaagaaaucuuaguaaa

SEQ ID NO: 141 - RNA, 21 nt, Artificial Sequence
  source: /note="Description of Artificial Sequence: Synthetic oligonucleotide"
ucuuaucaaaguauaaacauu

SEQ ID NO: 142 - RNA, 21 nt, Artificial Sequence
  source: /note="Description of Artificial Sequence: Synthetic oligonucleotide"
ucccuacaaacugaauuuggu

SEQ ID NO: 143 - RNA, 21 nt, Artificial Sequence
  source: /note="Description of Artificial Sequence: Synthetic oligonucleotide"
caggagcaaacauaugucauu

SEQ ID NO: 144 - RNA, 21 nt, Artificial Sequence
  source: /note="Description of Artificial Sequence: Synthetic oligonucleotide"
acauguaacaacuguaguuca

SEQ ID NO: 145 - RNA, 21 nt, Artificial Sequence
  source: /note="Description of Artificial Sequence: Synthetic oligonucleotide"
caggaaaucauuggaacauuu

SEQ ID NO: 146 - RNA, 21 nt, Artificial Sequence
  source: /note="Description of Artificial Sequence: Synthetic oligonucleotide"
uuuaagaauuuugaaauuacu

SEQ ID NO: 147 - RNA, 21 nt, Artificial Sequence
  source: /note="Description of Artificial Sequence: Synthetic oligonucleotide"
uauucugcaacugaauucgau

SEQ ID NO: 148 - RNA, 21 nt, Artificial Sequence
  source: /note="Description of Artificial Sequence: Synthetic oligonucleotide"
gcccuuggaaagaguauuuca

SEQ ID NO: 149 - RNA, 21 nt, Artificial Sequence
  source: /note="Description of Artificial Sequence: Synthetic oligonucleotide"
ccugauaaaaaauuuaguuac

SEQ ID NO: 150 - RNA, 21 nt, Artificial Sequence
  source: /note="Description of Artificial Sequence: Synthetic oligonucleotide"
cccuuggaaagaguauuucaa

SEQ ID NO: 151 - RNA, 21 nt, Artificial Sequence
  source: /note="Description of Artificial Sequence: Synthetic oligonucleotide"
ugcagaucaaacacaauuuca

SEQ ID NO: 152 - RNA, 21 nt, Artificial Sequence
  source: /note="Description of Artificial Sequence: Synthetic oligonucleotide"
cagaucaaacacaauuucagu

SEQ ID NO: 153 - RNA, 21 nt, Artificial Sequence
  source: /note="Description of Artificial Sequence: Synthetic oligonucleotide"
guuccggauauuugaacuuuu

SEQ ID NO: 154 - RNA, 21 nt, Artificial Sequence
  source: /note="Description of Artificial Sequence: Synthetic oligonucleotide"
auuuaaacaacaaguaccuuu

SEQ ID NO: 155 - RNA, 21 nt, Artificial Sequence
  source: /note="Description of Artificial Sequence: Synthetic oligonucleotide"
auuuaaacaacaaguaccuuu

SEQ ID NO: 156 - RNA, 21 nt, Artificial Sequence
  source: /note="Description of Artificial Sequence: Synthetic oligonucleotide"
ugacaaaauaacucacuauaa

SEQ ID NO: 157 - RNA, 21 nt, Artificial Sequence
  source: /note="Description of Artificial Sequence: Synthetic oligonucleotide"
ugacaaaauaacucacuauaa

SEQ ID NO: 158 - RNA, 21 nt, Artificial Sequence
  source: /note="Description of Artificial Sequence: Synthetic oligonucleotide"
gacaaaauaacucacuauaau

SEQ ID NO: 159 - RNA, 21 nt, Artificial Sequence
  source: /note="Description of Artificial Sequence: Synthetic oligonucleotide"
gacaaaauaacucacuauaau

SEQ ID NO: 160 - RNA, 21 nt, Artificial Sequence
  source: /note="Description of Artificial Sequence: Synthetic oligonucleotide"
guuccggauauuugaacuuuu

SEQ ID NO: 161 - RNA, 21 nt, Artificial Sequence
  source: /note="Description of Artificial Sequence: Synthetic oligonucleotide"
guuccggauauuugaacuuuu

SEQ ID NO: 162 - RNA, 21 nt, Artificial Sequence
  source: /note="Description of Artificial Sequence: Synthetic oligonucleotide"
ugcagaucaaacacaauuuca

SEQ ID NO: 163 - RNA, 21 nt, Artificial Sequence
  source: /note="Description of Artificial Sequence: Synthetic oligonucleotide"
ugcagaucaaacacaauuuca

SEQ ID NO: 164 - RNA, 21 nt, Artificial Sequence
  source: /note="Description of Artificial Sequence: Synthetic oligonucleotide"
aagcaagauauuuuuauaaua

SEQ ID NO: 165 - RNA, 21 nt, Artificial Sequence
  source: /note="Description of Artificial Sequence: Synthetic oligonucleotide"
aagcaagauauuuuuauaaua

SEQ ID NO: 166 - RNA, 21 nt, Artificial Sequence
  source: /note="Description of Artificial Sequence: Synthetic oligonucleotide"
cagaucaaacacaauuucagu

SEQ ID NO: 167 - RNA, 21 nt, Artificial Sequence
  source: /note="Description of Artificial Sequence: Synthetic oligonucleotide"
cagaucaaacacaauuucagu

SEQ ID NO: 168 - RNA, 23 nt, Artificial Sequence
  source: /note="Description of Artificial Sequence: Synthetic oligonucleotide"
aaguaauuauagugaguuauuuu

SEQ ID NO: 169 - RNA, 23 nt, Artificial Sequence
  source: /note="Description of Artificial Sequence: Synthetic oligonucleotide"
uuauagugaguuauuuugucaau

SEQ ID NO: 170 - RNA, 23 nt, Artificial Sequence
  source: /note="Description of Artificial Sequence: Synthetic oligonucleotide"
aaggccaauuuccagaggaagca

SEQ ID NO: 171 - RNA, 23 nt, Artificial Sequence
  source: /note="Description of Artificial Sequence: Synthetic oligonucleotide"
auuauagugaguuauuuugucaa

SEQ ID NO: 172 - RNA, 23 nt, Artificial Sequence
  source: /note="Description of Artificial Sequence: Synthetic oligonucleotide"
ugaaggccaauuuccagaggaag

SEQ ID NO: 173 - RNA, 23 nt, Artificial Sequence
  source: /note="Description of Artificial Sequence: Synthetic oligonucleotide"
uauuauaaaaauaucuugcuuuu

SEQ ID NO: 174 - RNA, 23 nt, Artificial Sequence
  source: /note="Description of Artificial Sequence: Synthetic oligonucleotide"
uguacuugacaaaaacauuuucu

SEQ ID NO: 175 - RNA, 23 nt, Artificial Sequence
  source: /note="Description of Artificial Sequence: Synthetic oligonucleotide"
aaagguacuuguuguuuaaaucu

SEQ ID NO: 176 - RNA, 23 nt, Artificial Sequence
  source: /note="Description of Artificial Sequence: Synthetic oligonucleotide"
uccuucacagacuuucugaauuu

SEQ ID NO: 177 - RNA, 23 nt, Artificial Sequence
  source: /note="Description of Artificial Sequence: Synthetic oligonucleotide"
uugcaucaaaugcuucaguguau

SEQ ID NO: 178 - RNA, 23 nt, Artificial Sequence
  source: /note="Description of Artificial Sequence: Synthetic oligonucleotide"
gacauuuuaacacagaacugcau

SEQ ID NO: 179 - RNA, 23 nt, Artificial Sequence
  source: /note="Description of Artificial Sequence: Synthetic oligonucleotide"
uccuuuuacacucaaaauccuuu

SEQ ID NO: 180 - RNA, 23 nt, Artificial Sequence
  source: /note="Description of Artificial Sequence: Synthetic oligonucleotide"
uucuuuacaagguucaucauuuu

SEQ ID NO: 181 - RNA, 23 nt, Artificial Sequence
  source: /note="Description of Artificial Sequence: Synthetic oligonucleotide"
aaugaaaaauguuccaaugauuu

SEQ ID NO: 182 - RNA, 23 nt, Artificial Sequence
  source: /note="Description of Artificial Sequence: Synthetic oligonucleotide"
aauaacuccgaauuucuggcuug

SEQ ID NO: 183 - RNA, 23 nt, Artificial Sequence
  source: /note="Description of Artificial Sequence: Synthetic oligonucleotide"
gugaguuuuaucucccagggaaa

SEQ ID NO: 184 - RNA, 23 nt, Artificial Sequence
  source: /note="Description of Artificial Sequence: Synthetic oligonucleotide"
uuuacaagguucaucauuuucuu

SEQ ID NO: 185 - RNA, 23 nt, Artificial Sequence
  source: /note="Description of Artificial Sequence: Synthetic oligonucleotide"
aucaaaugugacuugagcaauuc

SEQ ID NO: 186 - RNA, 23 nt, Artificial Sequence
  source: /note="Description of Artificial Sequence: Synthetic oligonucleotide"
uuuauaagcauaugcaaucucug

SEQ ID NO: 187 - RNA, 23 nt, Artificial Sequence
  source: /note="Description of Artificial Sequence: Synthetic oligonucleotide"
uaaauuuuuuaucaggauaacuu

SEQ ID NO: 188 - RNA, 23 nt, Artificial Sequence
  source: /note="Description of Artificial Sequence: Synthetic oligonucleotide"
aauaaaagcugcaaacuuccuca

SEQ ID NO: 189 - RNA, 23 nt, Artificial Sequence
  source: /note="Description of Artificial Sequence: Synthetic oligonucleotide"
uccaauaugaucaauuucuucua

SEQ ID NO: 190 - RNA, 23 nt, Artificial Sequence
  source: /note="Description of Artificial Sequence: Synthetic oligonucleotide"
aacuaaauuuuuuaucaggauaa

SEQ ID NO: 191 - RNA, 23 nt, Artificial Sequence
  source: /note="Description of Artificial Sequence: Synthetic oligonucleotide"
uuuacuaagauuucuuuuccaaa

SEQ ID NO: 192 - RNA, 23 nt, Artificial Sequence
  source: /note="Description of Artificial Sequence: Synthetic oligonucleotide"
aauguuuauacuuugauaagaug

SEQ ID NO: 193 - RNA, 23 nt, Artificial Sequence
  source: /note="Description of Artificial Sequence: Synthetic oligonucleotide"
accaaauucaguuuguagggaga

SEQ ID NO: 194 - RNA, 23 nt, Artificial Sequence
  source: /note="Description of Artificial Sequence: Synthetic oligonucleotide"
aaugacauauguuugcuccuguc

SEQ ID NO: 195 - RNA, 23 nt, Artificial Sequence
  source: /note="Description of Artificial Sequence: Synthetic oligonucleotide"
ugaacuacaguuguuacauguac

SEQ ID NO: 196 - RNA, 23 nt, Artificial Sequence
  source: /note="Description of Artificial Sequence: Synthetic oligonucleotide"
aaauguuccaaugauuuccuguu

SEQ ID NO: 197 - RNA, 23 nt, Artificial Sequence
  source: /note="Description of Artificial Sequence: Synthetic oligonucleotide"
aguaauuucaaaauucuuaaagu

SEQ ID NO: 198 - RNA, 23 nt, Artificial Sequence
  source: /note="Description of Artificial Sequence: Synthetic oligonucleotide"
aucgaauucaguugcagaauaac

SEQ ID NO: 199 - RNA, 23 nt, Artificial Sequence
  source: /note="Description of Artificial Sequence: Synthetic oligonucleotide"
ugaaauacucuuuccaagggcuu

SEQ ID NO: 200 - RNA, 23 nt, Artificial Sequence
  source: /note="Description of Artificial Sequence: Synthetic oligonucleotide"
guaacuaaauuuuuuaucaggau

SEQ ID NO: 201 - RNA, 23 nt, Artificial Sequence
  source: /note="Description of Artificial Sequence: Synthetic oligonucleotide"
uugaaauacucuuuccaagggcu

SEQ ID NO: 202 - RNA, 23 nt, Artificial Sequence
  source: /note="Description of Artificial Sequence: Synthetic oligonucleotide"
ugaaauuguguuugaucugcaga

SEQ ID NO: 203 - RNA, 23 nt, Artificial Sequence
  source: /note="Description of Artificial Sequence: Synthetic oligonucleotide"
acugaaauuguguuugaucugca

SEQ ID NO: 204 - RNA, 23 nt, Artificial Sequence
  source: /note="Description of Artificial Sequence: Synthetic oligonucleotide"
aaaaguucaaauauccggaaccg

SEQ ID NO: 205 - RNA, 23 nt, Artificial Sequence
  source: /note="Description of Artificial Sequence: Synthetic oligonucleotide"
aaagguacuuguuguuuaaaucu

SEQ ID NO: 206 - RNA, 23 nt, Artificial Sequence
  source: /note="Description of Artificial Sequence: Synthetic oligonucleotide"
aaagguacuuguuguuuaaaucu

SEQ ID NO: 207 - RNA, 23 nt, Artificial Sequence
  source: /note="Description of Artificial Sequence: Synthetic oligonucleotide"
uuauagugaguuauuuugucaau

SEQ ID NO: 208 - RNA, 23 nt, Artificial Sequence
  source: /note="Description of Artificial Sequence: Synthetic oligonucleotide"
uuauagugaguuauuuugucaau

SEQ ID NO: 209 - RNA, 23 nt, Artificial Sequence
  source: /note="Description of Artificial Sequence: Synthetic oligonucleotide"
auuauagugaguuauuuugucaa

SEQ ID NO: 210 - RNA, 23 nt, Artificial Sequence
  source: /note="Description of Artificial Sequence: Synthetic oligonucleotide"
auuauagugaguuauuuugucaa

SEQ ID NO: 211 - RNA, 23 nt, Artificial Sequence
  source: /note="Description of Artificial Sequence: Synthetic oligonucleotide"
aaaaguucaaauauccggaaccg

SEQ ID NO: 212 - RNA, 23 nt, Artificial Sequence
  source: /note="Description of Artificial Sequence: Synthetic oligonucleotide"
aaaaguucaaauauccggaaccg

SEQ ID NO: 213 - RNA, 23 nt, Artificial Sequence
  source: /note="Description of Artificial Sequence: Synthetic oligonucleotide"
ugaaauuguguuugaucugcaga

SEQ ID NO: 214 - RNA, 23 nt, Artificial Sequence
  source: /note="Description of Artificial Sequence: Synthetic oligonucleotide"
ugaaauuguguuugaucugcaga

SEQ ID NO: 215 - RNA, 23 nt, Artificial Sequence
  source: /note="Description of Artificial Sequence: Synthetic oligonucleotide"
uauuauaaaaauaucuugcuuuu

SEQ ID NO: 216 - RNA, 23 nt, Artificial Sequence
  source: /note="Description of Artificial Sequence: Synthetic oligonucleotide"
uauuauaaaaauaucuugcuuuu

SEQ ID NO: 217 - RNA, 23 nt, Artificial Sequence
  source: /note="Description of Artificial Sequence: Synthetic oligonucleotide"
acugaaauuguguuugaucugca

SEQ ID NO: 218 - RNA, 23 nt, Artificial Sequence
  source: /note="Description of Artificial Sequence: Synthetic oligonucleotide"
acugaaauuguguuugaucugca

SEQ ID NO: 219 - RNA, 19 nt, Artificial Sequence
  source: /note="Description of Artificial Sequence: Synthetic oligonucleotide"
cacuauaauuacuugauuu

SEQ ID NO: 220 - RNA, 19 nt, Artificial Sequence
  source: /note="Description of Artificial Sequence: Synthetic oligonucleotide"
uaacucacuauaauuacuu

SEQ ID NO: 221 - RNA, 19 nt, Artificial Sequence
  source: /note="Description of Artificial Sequence: Synthetic oligonucleotide"
acaaaauaacucacuauaa

SEQ ID NO: 222 - RNA, 19 nt, Artificial Sequence
  source: /note="Description of Artificial Sequence: Synthetic oligonucleotide"
uccucuggaaauuggccuu

SEQ ID NO: 223 - RNA, 19 nt, Artificial Sequence
  source: /note="Description of Artificial Sequence: Synthetic oligonucleotide"
caaaauaacucacuauaau

SEQ ID NO: 224 - RNA, 19 nt, Artificial Sequence
  source: /note="Description of Artificial Sequence: Synthetic oligonucleotide"
cucuggaaauuggccuuca

SEQ ID NO: 225 - RNA, 19 nt, Artificial Sequence
  source: /note="Description of Artificial Sequence: Synthetic oligonucleotide"
gcaagauauuuuuauaaua

SEQ ID NO: 226 - RNA, 19 nt, Artificial Sequence
  source: /note="Description of Artificial Sequence: Synthetic oligonucleotide"
aauguuuuugucaaguaca

SEQ ID NO: 227 - RNA, 19 nt, Artificial Sequence
  source: /note="Description of Artificial Sequence: Synthetic oligonucleotide"
uuaaacaacaaguaccuuu

SEQ ID NO: 228 - RNA, 19 nt, Artificial Sequence
  source: /note="Description of Artificial Sequence: Synthetic oligonucleotide"
ucagaaagucugugaagga

SEQ ID NO: 229 - RNA, 19 nt, Artificial Sequence
  source: /note="Description of Artificial Sequence: Synthetic oligonucleotide"
acugaagcauuugaugcaa

SEQ ID NO: 230 - RNA, 19 nt, Artificial Sequence
  source: /note="Description of Artificial Sequence: Synthetic oligonucleotide"
aguucuguguuaaaauguc

SEQ ID NO: 231 - RNA, 19 nt, Artificial Sequence
  source: /note="Description of Artificial Sequence: Synthetic oligonucleotide"
gauuuugaguguaaaagga

SEQ ID NO: 232 - RNA, 19 nt, Artificial Sequence
  source: /note="Description of Artificial Sequence: Synthetic oligonucleotide"
ugaugaaccuuguaaagaa

SEQ ID NO: 233 - RNA, 19 nt, Artificial Sequence
  source: /note="Description of Artificial Sequence: Synthetic oligonucleotide"
cauuggaacauuuuucauu

SEQ ID NO: 234 - RNA, 19 nt, Artificial Sequence
  source: /note="Description of Artificial Sequence: Synthetic oligonucleotide"
ccagaaauucggaguuauu

SEQ ID NO: 235 - RNA, 19 nt, Artificial Sequence
  source: /note="Description of Artificial Sequence: Synthetic oligonucleotide"
ccugggagauaaaacucac

SEQ ID NO: 236 - RNA, 19 nt, Artificial Sequence
  source: /note="Description of Artificial Sequence: Synthetic oligonucleotide"
aaaugaugaaccuuguaaa

SEQ ID NO: 237 - RNA, 19 nt, Artificial Sequence
  source: /note="Description of Artificial Sequence: Synthetic oligonucleotide"
ugcucaagucacauuugau

SEQ ID NO: 238 - RNA, 19 nt, Artificial Sequence
  source: /note="Description of Artificial Sequence: Synthetic oligonucleotide"
gauugcauaugcuuauaaa

SEQ ID NO: 239 - RNA, 19 nt, Artificial Sequence
  source: /note="Description of Artificial Sequence: Synthetic oligonucleotide"
uauccugauaaaaaauuua

SEQ ID NO: 240 - RNA, 19 nt, Artificial Sequence
  source: /note="Description of Artificial Sequence: Synthetic oligonucleotide"
gaaguuugcagcuuuuauu

SEQ ID NO: 241 - RNA, 19 nt, Artificial Sequence
  source: /note="Description of Artificial Sequence: Synthetic oligonucleotide"
agaaauugaucauauugga

SEQ ID NO: 242 - RNA, 19 nt, Artificial Sequence
  source: /note="Description of Artificial Sequence: Synthetic oligonucleotide"
ccugauaaaaaauuuaguu

SEQ ID NO: 243 - RNA, 19 nt, Artificial Sequence
  source: /note="Description of Artificial Sequence: Synthetic oligonucleotide"
gaaaagaaaucuuaguaaa

SEQ ID NO: 244 - RNA, 19 nt, Artificial Sequence
  source: /note="Description of Artificial Sequence: Synthetic oligonucleotide"
uuaucaaaguauaaacauu

SEQ ID NO: 245 - RNA, 19 nt, Artificial Sequence
  source: /note="Description of Artificial Sequence: Synthetic oligonucleotide"
ccuacaaacugaauuuggu

SEQ ID NO: 246 - RNA, 19 nt, Artificial Sequence
  source: /note="Description of Artificial Sequence: Synthetic oligonucleotide"
ggagcaaacauaugucauu

SEQ ID NO: 247 - RNA, 19 nt, Artificial Sequence
  source: /note="Description of Artificial Sequence: Synthetic oligonucleotide"
auguaacaacuguaguuca

SEQ ID NO: 248 - RNA, 19 nt, Artificial Sequence
  source: /note="Description of Artificial Sequence: Synthetic oligonucleotide"
ggaaaucauuggaacauuu

SEQ ID NO: 249 - RNA, 19 nt, Artificial Sequence
  source: /note="Description of Artificial Sequence: Synthetic oligonucleotide"
uaagaauuuugaaauuacu

SEQ ID NO: 250 - RNA, 19 nt, Artificial Sequence
  source: /note="Description of Artificial Sequence: Synthetic oligonucleotide"
uucugcaacugaauucgau

SEQ ID NO: 251 - RNA, 19 nt, Artificial Sequence
  source: /note="Description of Artificial Sequence: Synthetic oligonucleotide"
ccuuggaaagaguauuuca

SEQ ID NO: 252 - RNA, 19 nt, Artificial Sequence
  source: /note="Description of Artificial Sequence: Synthetic oligonucleotide"
ugauaaaaaauuuaguuac

SEQ ID NO: 253 - RNA, 19 nt, Artificial Sequence
  source: /note="Description of Artificial Sequence: Synthetic oligonucleotide"
cuuggaaagaguauuucaa

SEQ ID NO: 254 - RNA, 19 nt, Artificial Sequence
  source: /note="Description of Artificial Sequence: Synthetic oligonucleotide"
cacuauaauuacuugauuu

SEQ ID NO: 255 - RNA, 19 nt, Artificial Sequence
  source: /note="Description of Artificial Sequence: Synthetic oligonucleotide"
uaacucacuauaauuacuu

SEQ ID NO: 256 - RNA, 19 nt, Artificial Sequence
  source: /note="Description of Artificial Sequence: Synthetic oligonucleotide"
acaaaauaacucacuauaa

SEQ ID NO: 257 - RNA, 19 nt, Artificial Sequence
  source: /note="Description of Artificial Sequence: Synthetic oligonucleotide"
uccucuggaaauuggccuu

SEQ ID NO: 258 - RNA, 19 nt, Artificial Sequence
  source: /note="Description of Artificial Sequence: Synthetic oligonucleotide"
caaaauaacucacuauaau

SEQ ID NO: 259 - RNA, 19 nt, Artificial Sequence
  source: /note="Description of Artificial Sequence: Synthetic oligonucleotide"
cucuggaaauuggccuuca

SEQ ID NO: 260 - RNA, 19 nt, Artificial Sequence
  source: /note="Description of Artificial Sequence: Synthetic oligonucleotide"
gcaagauauuuuuauaaua

SEQ ID NO: 261 - RNA, 19 nt, Artificial Sequence
  source: /note="Description of Artificial Sequence: Synthetic oligonucleotide"
aauguuuuugucaaguaca

SEQ ID NO: 262 - RNA, 19 nt, Artificial Sequence
  source: /note="Description of Artificial Sequence: Synthetic oligonucleotide"
uuaaacaacaaguaccuuu

SEQ ID NO: 263 - RNA, 19 nt, Artificial Sequence
  source: /note="Description of Artificial Sequence: Synthetic oligonucleotide"
ucagaaagucugugaagga

SEQ ID NO: 264 - RNA, 19 nt, Artificial Sequence
  source: /note="Description of Artificial Sequence: Synthetic oligonucleotide"
acugaagcauuugaugcaa

SEQ ID NO: 265 - RNA, 19 nt, Artificial Sequence
  source: /note="Description of Artificial Sequence: Synthetic oligonucleotide"
aguucuguguuaaaauguc

SEQ ID NO: 266 - RNA, 19 nt, Artificial Sequence
  source: /note="Description of Artificial Sequence: Synthetic oligonucleotide"
cacuauaauuacuugauuu

SEQ ID NO: 267 - RNA, 19 nt, Artificial Sequence
  source: /note="Description of Artificial Sequence: Synthetic oligonucleotide"
uaacucacuauaauuacuu

SEQ ID NO: 268 - RNA, 19 nt, Artificial Sequence
  source: /note="Description of Artificial Sequence: Synthetic oligonucleotide"
acaaaauaacucacuauaa

SEQ ID NO: 269 - RNA, 19 nt, Artificial Sequence
  source: /note="Description of Artificial Sequence: Synthetic oligonucleotide"
uccucuggaaauuggccuu

SEQ ID NO: 270 - RNA, 19 nt, Artificial Sequence
  source: /note="Description of Artificial Sequence: Synthetic oligonucleotide"
caaaauaacucacuauaau

SEQ ID NO: 271 - RNA, 19 nt, Artificial Sequence
  source: /note="Description of Artificial Sequence: Synthetic oligonucleotide"
cucuggaaauuggccuuca

SEQ ID NO: 272 - RNA, 19 nt, Artificial Sequence
  source: /note="Description of Artificial Sequence: Synthetic oligonucleotide"
gcaagauauuuuuauaaua

SEQ ID NO: 273 - RNA, 19 nt, Artificial Sequence
  source: /note="Description of Artificial Sequence: Synthetic oligonucleotide"
aauguuuuugucaaguaca

SEQ ID NO: 274 - RNA, 19 nt, Artificial Sequence
  source: /note="Description of Artificial Sequence: Synthetic oligonucleotide"
uuaaacaacaaguaccuuu

SEQ ID NO: 275 - RNA, 19 nt, Artificial Sequence
  source: /note="Description of Artificial Sequence: Synthetic oligonucleotide"
ucagaaagucugugaagga

SEQ ID NO: 276 - RNA, 19 nt, Artificial Sequence
  source: /note="Description of Artificial Sequence: Synthetic oligonucleotide"
acugaagcauuugaugcaa

SEQ ID NO: 277 - RNA, 19 nt, Artificial Sequence
  source: /note="Description of Artificial Sequence: Synthetic oligonucleotide"
aguucuguguuaaaauguc

SEQ ID NO: 278 - RNA, 19 nt, Artificial Sequence
  source: /note="Description of Artificial Sequence: Synthetic oligonucleotide"
cacuauaauuacuugauuu

SEQ ID NO: 279 - RNA, 19 nt, Artificial Sequence
  source: /note="Description of Artificial Sequence: Synthetic oligonucleotide"
uaacucacuauaauuacuu

SEQ ID NO: 280 - RNA, 19 nt, Artificial Sequence
  source: /note="Description of Artificial Sequence: Synthetic oligonucleotide"
acaaaauaacucacuauaa

SEQ ID NO: 281 - RNA, 19 nt, Artificial Sequence
  source: /note="Description of Artificial Sequence: Synthetic oligonucleotide"
uccucuggaaauuggccuu

SEQ ID NO: 282 - RNA, 19 nt, Artificial Sequence
  source: /note="Description of Artificial Sequence: Synthetic oligonucleotide"
caaaauaacucacuauaau

SEQ ID NO: 283 - RNA, 19 nt, Artificial Sequence
  source: /note="Description of Artificial Sequence: Synthetic oligonucleotide"
cucuggaaauuggccuuca

SEQ ID NO: 284 - RNA, 19 nt, Artificial Sequence
  source: /note="Description of Artificial Sequence: Synthetic oligonucleotide"
gcaagauauuuuuauaaua

SEQ ID NO: 285 - RNA, 19 nt, Artificial Sequence
  source: /note="Description of Artificial Sequence: Synthetic oligonucleotide"
aauguuuuugucaaguaca

SEQ ID NO: 286 - RNA, 19 nt, Artificial Sequence
  source: /note="Description of Artificial Sequence: Synthetic oligonucleotide"
uuaaacaacaaguaccuuu

SEQ ID NO: 287 - RNA, 19 nt, Artificial Sequence
  source: /note="Description of Artificial Sequence: Synthetic oligonucleotide"
ucagaaagucugugaagga

SEQ ID NO: 288 - RNA, 19 nt, Artificial Sequence
  source: /note="Description of Artificial Sequence: Synthetic oligonucleotide"
acugaagcauuugaugcaa

SEQ ID NO: 289 - RNA, 19 nt, Artificial Sequence
  source: /note="Description of Artificial Sequence: Synthetic oligonucleotide"
aguucuguguuaaaauguc

SEQ ID NO: 290 - RNA, 19 nt, Artificial Sequence
  source: /note="Description of Artificial Sequence: Synthetic oligonucleotide"
cacuauaauuacuugauuu

SEQ ID NO: 291 - RNA, 19 nt, Artificial Sequence
  source: /note="Description of Artificial Sequence: Synthetic oligonucleotide"
uaacucacuauaauuacuu

SEQ ID NO: 292 - RNA, 19 nt, Artificial Sequence
  source: /note="Description of Artificial Sequence: Synthetic oligonucleotide"
acaaaauaacucacuauaa

SEQ ID NO: 293 - RNA, 19 nt, Artificial Sequence
  source: /note="Description of Artificial Sequence: Synthetic oligonucleotide"
uccucuggaaauuggccuu

SEQ ID NO: 294 - RNA, 19 nt, Artificial Sequence
  source: /note="Description of Artificial Sequence: Synthetic oligonucleotide"
caaaauaacucacuauaau

SEQ ID NO: 295 - RNA, 19 nt, Artificial Sequence
  source: /note="Description of Artificial Sequence: Synthetic oligonucleotide"
cucuggaaauuggccuuca

SEQ ID NO: 296 - RNA, 19 nt, Artificial Sequence
  source: /note="Description of Artificial Sequence: Synthetic oligonucleotide"
gcaagauauuuuuauaaua

SEQ ID NO: 297 - RNA, 19 nt, Artificial Sequence
  source: /note="Description of Artificial Sequence: Synthetic oligonucleotide"
aauguuuuugucaaguaca

SEQ ID NO: 298 - RNA, 19 nt, Artificial Sequence
  source: /note="Description of Artificial Sequence: Synthetic oligonucleotide"
uuaaacaacaaguaccuuu

SEQ ID NO: 299 - RNA, 19 nt, Artificial Sequence
  source: /note="Description of Artificial Sequence: Synthetic oligonucleotide"
ucagaaagucugugaagga

SEQ ID NO: 300 - RNA, 19 nt, Artificial Sequence
  source: /note="Description of Artificial Sequence: Synthetic oligonucleotide"
acugaagcauuugaugcaa

SEQ ID NO: 301 - RNA, 19 nt, Artificial Sequence
  source: /note="Description of Artificial Sequence: Synthetic oligonucleotide"
aguucuguguuaaaauguc

SEQ ID NO: 302 - RNA, 19 nt, Artificial Sequence
  source: /note="Description of Artificial Sequence: Synthetic oligonucleotide"
aaaucaaguaauuauagug

SEQ ID NO: 303 - RNA, 19 nt, Artificial Sequence
  source: /note="Description of Artificial Sequence: Synthetic oligonucleotide"
aaguaauuauagugaguua

SEQ ID NO: 304 - RNA, 19 nt, Artificial Sequence
  source: /note="Description of Artificial Sequence: Synthetic oligonucleotide"
uuauagugaguuauuuugu

SEQ ID NO: 305 - RNA, 19 nt, Artificial Sequence
  source: /note="Description of Artificial Sequence: Synthetic oligonucleotide"
aaggccaauuuccagagga

SEQ ID NO: 306 - RNA, 19 nt, Artificial Sequence
  source: /note="Description of Artificial Sequence: Synthetic oligonucleotide"
auuauagugaguuauuuug

SEQ ID NO: 307 - RNA, 19 nt, Artificial Sequence
  source: /note="Description of Artificial Sequence: Synthetic oligonucleotide"
ugaaggccaauuuccagag

SEQ ID NO: 308 - RNA, 19 nt, Artificial Sequence
  source: /note="Description of Artificial Sequence: Synthetic oligonucleotide"
uauuauaaaaauaucuugc

SEQ ID NO: 309 - RNA, 19 nt, Artificial Sequence
  source: /note="Description of Artificial Sequence: Synthetic oligonucleotide"
uguacuugacaaaaacauu

SEQ ID NO: 310 - RNA, 19 nt, Artificial Sequence
  source: /note="Description of Artificial Sequence: Synthetic oligonucleotide"
aaagguacuuguuguuuaa

SEQ ID NO: 311 - RNA, 19 nt, Artificial Sequence
  source: /note="Description of Artificial Sequence: Synthetic oligonucleotide"
uccuucacagacuuucuga

SEQ ID NO: 312 - RNA, 19 nt, Artificial Sequence
  source: /note="Description of Artificial Sequence: Synthetic oligonucleotide"
uugcaucaaaugcuucagu

SEQ ID NO: 313 - RNA, 19 nt, Artificial Sequence
  source: /note="Description of Artificial Sequence: Synthetic oligonucleotide"
gacauuuuaacacagaacu

SEQ ID NO: 314 - RNA, 19 nt, Artificial Sequence
  source: /note="Description of Artificial Sequence: Synthetic oligonucleotide"
uccuuuuacacucaaaauc

SEQ ID NO: 315 - RNA, 19 nt, Artificial Sequence
  source: /note="Description of Artificial Sequence: Synthetic oligonucleotide"
uucuuuacaagguucauca

SEQ ID NO: 316 - RNA, 19 nt, Artificial Sequence
  source: /note="Description of Artificial Sequence: Synthetic oligonucleotide"
aaugaaaaauguuccaaug

SEQ ID NO: 317 - RNA, 19 nt, Artificial Sequence
  source: /note="Description of Artificial Sequence: Synthetic oligonucleotide"
aauaacuccgaauuucugg

SEQ ID NO: 318 - RNA, 19 nt, Artificial Sequence
  source: /note="Description of Artificial Sequence: Synthetic oligonucleotide"
gugaguuuuaucucccagg

SEQ ID NO: 319 - RNA, 19 nt, Artificial Sequence
  source: /note="Description of Artificial Sequence: Synthetic oligonucleotide"
uuuacaagguucaucauuu

SEQ ID NO: 320 - RNA, 19 nt, Artificial Sequence
  source: /note="Description of Artificial Sequence: Synthetic oligonucleotide"
aucaaaugugacuugagca

SEQ ID NO: 321 - RNA, 19 nt, Artificial Sequence
  source: /note="Description of Artificial Sequence: Synthetic oligonucleotide"
uuuauaagcauaugcaauc

SEQ ID NO: 322 - RNA, 19 nt, Artificial Sequence
  source: /note="Description of Artificial Sequence: Synthetic oligonucleotide"
uaaauuuuuuaucaggaua

SEQ ID NO: 323 - RNA, 19 nt, Artificial Sequence
  source: /note="Description of Artificial Sequence: Synthetic oligonucleotide"
aauaaaagcugcaaacuuc

SEQ ID NO: 324 - RNA, 19 nt, Artificial Sequence
  source: /note="Description of Artificial Sequence: Synthetic oligonucleotide"
uccaauaugaucaauuucu

SEQ ID NO: 325 - RNA, 19 nt, Artificial Sequence
  source: /note="Description of Artificial Sequence: Synthetic oligonucleotide"
aacuaaauuuuuuaucagg

SEQ ID NO: 326 - RNA, 19 nt, Artificial Sequence
  source: /note="Description of Artificial Sequence: Synthetic oligonucleotide"
uuuacuaagauuucuuuuc

SEQ ID NO: 327 - RNA, 19 nt, Artificial Sequence
  source: /note="Description of Artificial Sequence: Synthetic oligonucleotide"
aauguuuauacuuugauaa

SEQ ID NO: 328 - RNA, 19 nt, Artificial Sequence
  source: /note="Description of Artificial Sequence: Synthetic oligonucleotide"
accaaauucaguuuguagg

SEQ ID NO: 329 - RNA, 19 nt, Artificial Sequence
  source: /note="Description of Artificial Sequence: Synthetic oligonucleotide"
aaugacauauguuugcucc

SEQ ID NO: 330 - RNA, 19 nt, Artificial Sequence
  source: /note="Description of Artificial Sequence: Synthetic oligonucleotide"
ugaacuacaguuguuacau

SEQ ID NO: 331 - RNA, 19 nt, Artificial Sequence
  source: /note="Description of Artificial Sequence: Synthetic oligonucleotide"
aaauguuccaaugauuucc

SEQ ID NO: 332 - RNA, 19 nt, Artificial Sequence
  source: /note="Description of Artificial Sequence: Synthetic oligonucleotide"
aguaauuucaaaauucuua

SEQ ID NO: 333 - RNA, 19 nt, Artificial Sequence
  source: /note="Description of Artificial Sequence: Synthetic oligonucleotide"
aucgaauucaguugcagaa

SEQ ID NO: 334 - RNA, 19 nt, Artificial Sequence
  source: /note="Description of Artificial Sequence: Synthetic oligonucleotide"
ugaaauacucuuuccaagg

SEQ ID NO: 335 - RNA, 19 nt, Artificial Sequence
  source: /note="Description of Artificial Sequence: Synthetic oligonucleotide"
guaacuaaauuuuuuauca

SEQ ID NO: 336 - RNA, 19 nt, Artificial Sequence
  source: /note="Description of Artificial Sequence: Synthetic oligonucleotide"
uugaaauacucuuuccaag

SEQ ID NO: 337 - RNA, 19 nt, Artificial Sequence
  source: /note="Description of Artificial Sequence: Synthetic oligonucleotide"
aaaucaaguaauuauagug

SEQ ID NO: 338 - RNA, 19 nt, Artificial Sequence
  source: /note="Description of Artificial Sequence: Synthetic oligonucleotide"
aaguaauuauagugaguua

SEQ ID NO: 339 - RNA, 19 nt, Artificial Sequence
  source: /note="Description of Artificial Sequence: Synthetic oligonucleotide"
uuauagugaguuauuuugu

SEQ ID NO: 340 - RNA, 19 nt, Artificial Sequence
  source: /note="Description of Artificial Sequence: Synthetic oligonucleotide"
aaggccaauuuccagagga

SEQ ID NO: 341 - RNA, 19 nt, Artificial Sequence
  source: /note="Description of Artificial Sequence: Synthetic oligonucleotide"
auuauagugaguuauuuug

SEQ ID NO: 342 - RNA, 19 nt, Artificial Sequence
  source: /note="Description of Artificial Sequence: Synthetic oligonucleotide"
ugaaggccaauuuccagag

SEQ ID NO: 343 - RNA, 19 nt, Artificial Sequence
  source: /note="Description of Artificial Sequence: Synthetic oligonucleotide"
uauuauaaaaauaucuugc

SEQ ID NO: 344 - RNA, 19 nt, Artificial Sequence
  source: /note="Description of Artificial Sequence: Synthetic oligonucleotide"
uguacuugacaaaaacauu

SEQ ID NO: 345 - RNA, 19 nt, Artificial Sequence
  source: /note="Description of Artificial Sequence: Synthetic oligonucleotide"
aaagguacuuguuguuuaa

SEQ ID NO: 346 - RNA, 19 nt, Artificial Sequence
  source: /note="Description of Artificial Sequence: Synthetic oligonucleotide"
uccuucacagacuuucuga

SEQ ID NO: 347 - RNA, 19 nt, Artificial Sequence
  source: /note="Description of Artificial Sequence: Synthetic oligonucleotide"
uugcaucaaaugcuucagu

SEQ ID NO: 348 - RNA, 19 nt, Artificial Sequence
  source: /note="Description of Artificial Sequence: Synthetic oligonucleotide"
gacauuuuaacacagaacu

SEQ ID NO: 349 - RNA, 19 nt, Artificial Sequence
  source: /note="Description of Artificial Sequence: Synthetic oligonucleotide"
aaaucaaguaauuauagug

SEQ ID NO: 350 - RNA, 19 nt, Artificial Sequence
  source: /note="Description of Artificial Sequence: Synthetic oligonucleotide"
aaguaauuauagugaguua

SEQ ID NO: 351 - RNA, 19 nt, Artificial Sequence
  source: /note="Description of Artificial Sequence: Synthetic oligonucleotide"
uuauagugaguuauuuugu

SEQ ID NO: 352 - RNA, 19 nt, Artificial Sequence
  source: /note="Description of Artificial Sequence: Synthetic oligonucleotide"
aaggccaauuuccagagga

SEQ ID NO: 353 - RNA, 19 nt, Artificial Sequence
  source: /note="Description of Artificial Sequence: Synthetic oligonucleotide"
auuauagugaguuauuuug

SEQ ID NO: 354 - RNA, 19 nt, Artificial Sequence
  source: /note="Description of Artificial Sequence: Synthetic oligonucleotide"
ugaaggccaauuuccagag

SEQ ID NO: 355 - RNA, 19 nt, Artificial Sequence
  source: /note="Description of Artificial Sequence: Synthetic oligonucleotide"
uauuauaaaaauaucuugc

SEQ ID NO: 356 - RNA, 19 nt, Artificial Sequence
  source: /note="Description of Artificial Sequence: Synthetic oligonucleotide"
uguacuugacaaaaacauu

SEQ ID NO: 357 - RNA, 19 nt, Artificial Sequence
  source: /note="Description of Artificial Sequence: Synthetic oligonucleotide"
aaagguacuuguuguuuaa

SEQ ID NO: 358 - RNA, 19 nt, Artificial Sequence
  source: /note="Description of Artificial Sequence: Synthetic oligonucleotide"
uccuucacagacuuucuga

SEQ ID NO: 359 - RNA, 19 nt, Artificial Sequence
  source: /note="Description of Artificial Sequence: Synthetic oligonucleotide"
uugcaucaaaugcuucagu

SEQ ID NO: 360 - RNA, 19 nt, Artificial Sequence
  source: /note="Description of Artificial Sequence: Synthetic oligonucleotide"
gacauuuuaacacagaacu

SEQ ID NO: 361 - RNA, 19 nt, Artificial Sequence
  source: /note="Description of Artificial Sequence: Synthetic oligonucleotide"
aaaucaaguaauuauagug

SEQ ID NO: 362 - RNA, 19 nt, Artificial Sequence
  source: /note="Description of Artificial Sequence: Synthetic oligonucleotide"
aaguaauuauagugaguua

SEQ ID NO: 363 - RNA, 19 nt, Artificial Sequence
  source: /note="Description of Artificial Sequence: Synthetic oligonucleotide"
uuauagugaguuauuuugu

SEQ ID NO: 364 - RNA, 19 nt, Artificial Sequence
  source: /note="Description of Artificial Sequence: Synthetic oligonucleotide"
aaggccaauuuccagagga

SEQ ID NO: 365 - RNA, 19 nt, Artificial Sequence
  source: /note="Description of Artificial Sequence: Synthetic oligonucleotide"
auuauagugaguuauuuug

SEQ ID NO: 366 - RNA, 19 nt, Artificial Sequence
  source: /note="Description of Artificial Sequence: Synthetic oligonucleotide"
ugaaggccaauuuccagag

SEQ ID NO: 367 - RNA, 19 nt, Artificial Sequence
  source: /note="Description of Artificial Sequence: Synthetic oligonucleotide"
uauuauaaaaauaucuugc

SEQ ID NO: 368 - RNA, 19 nt, Artificial Sequence
  source: /note="Description of Artificial Sequence: Synthetic oligonucleotide"
uguacuugacaaaaacauu

SEQ ID NO: 369 - RNA, 19 nt, Artificial Sequence
  source: /note="Description of Artificial Sequence: Synthetic oligonucleotide"
aaagguacuuguuguuuaa

SEQ ID NO: 370 - RNA, 19 nt, Artificial Sequence
  source: /note="Description of Artificial Sequence: Synthetic oligonucleotide"
uccuucacagacuuucuga

SEQ ID NO: 371 - RNA, 19 nt, Artificial Sequence
  source: /note="Description of Artificial Sequence: Synthetic oligonucleotide"
uugcaucaaaugcuucagu

SEQ ID NO: 372 - RNA, 19 nt, Artificial Sequence
  source: /note="Description of Artificial Sequence: Synthetic oligonucleotide"
gacauuuuaacacagaacu

SEQ ID NO: 373 - RNA, 19 nt, Artificial Sequence
  source: /note="Description of Artificial Sequence: Synthetic oligonucleotide"
aaaucaaguaauuauagug

SEQ ID NO: 374 - RNA, 19 nt, Artificial Sequence
  source: /note="Description of Artificial Sequence: Synthetic oligonucleotide"
aaguaauuauagugaguua

SEQ ID NO: 375 - RNA, 19 nt, Artificial Sequence
  source: /note="Description of Artificial Sequence: Synthetic oligonucleotide"
uuauagugaguuauuuugu

SEQ ID NO: 376 - RNA, 19 nt, Artificial Sequence
  source: /note="Description of Artificial Sequence: Synthetic oligonucleotide"
aaggccaauuuccagagga

SEQ ID NO: 377 - RNA, 19 nt, Artificial Sequence
  source: /note="Description of Artificial Sequence: Synthetic oligonucleotide"
auuauagugaguuauuuug

SEQ ID NO: 378 - RNA, 19 nt, Artificial Sequence
  source: /note="Description of Artificial Sequence: Synthetic oligonucleotide"
ugaaggccaauuuccagag

SEQ ID NO: 379 - RNA, 19 nt, Artificial Sequence
  source: /note="Description of Artificial Sequence: Synthetic oligonucleotide"
uauuauaaaaauaucuugc

SEQ ID NO: 380 - RNA, 19 nt, Artificial Sequence
  source: /note="Description of Artificial Sequence: Synthetic oligonucleotide"
uguacuugacaaaaacauu

SEQ ID NO: 381 - RNA, 19 nt, Artificial Sequence
  source: /note="Description of Artificial Sequence: Synthetic oligonucleotide"
aaagguacuuguuguuuaa

SEQ ID NO: 382 - RNA, 19 nt, Artificial Sequence
  source: /note="Description of Artificial Sequence: Synthetic oligonucleotide"
uccuucacagacuuucuga

SEQ ID NO: 383 - RNA, 19 nt, Artificial Sequence
  source: /note="Description of Artificial Sequence: Synthetic oligonucleotide"
uugcaucaaaugcuucagu

SEQ ID NO: 384 - RNA, 19 nt, Artificial Sequence
  source: /note="Description of Artificial Sequence: Synthetic oligonucleotide"
gacauuuuaacacagaacu

SEQ ID NO: 385 - DNA, 21 bp, Artificial Sequence
  source: /note="Description of Artificial Sequence: Synthetic oligonucleotide"
  source: /note="Description of Combined DNA/RNA Molecule: Synthetic oligonucleotide"
cacuauaauuacuugauuutt

SEQ ID NO: 386 - DNA, 21 bp, Artificial Sequence
  source: /note="Description of Artificial Sequence: Synthetic oligonucleotide"
  source: /note="Description of Combined DNA/RNA Molecule: Synthetic oligonucleotide"
uaacucacuauaauuacuutt

SEQ ID NO: 387 - DNA, 21 bp, Artificial Sequence
  source: /note="Description of Artificial Sequence: Synthetic oligonucleotide"
  source: /note="Description of Combined DNA/RNA Molecule: Synthetic oligonucleotide"
acaaaauaacucacuauaatt

SEQ ID NO: 388 - DNA, 21 bp, Artificial Sequence
  source: /note="Description of Artificial Sequence: Synthetic oligonucleotide"
  source: /note="Description of Combined DNA/RNA Molecule: Synthetic oligonucleotide"
uccucuggaaauuggccuutt

SEQ ID NO: 389 - DNA, 21 bp, Artificial Sequence
  source: /note="Description of Artificial Sequence: Synthetic oligonucleotide"
  source: /note="Description of Combined DNA/RNA Molecule: Synthetic oligonucleotide"
caaaauaacucacuauaautt

SEQ ID NO: 390 - DNA, 21 bp, Artificial Sequence
  source: /note="Description of Artificial Sequence: Synthetic oligonucleotide"
  source: /note="Description of Combined DNA/RNA Molecule: Synthetic oligonucleotide"
cucuggaaauuggccuucatt

SEQ ID NO: 391 - DNA, 21 bp, Artificial Sequence
  source: /note="Description of Artificial Sequence: Synthetic oligonucleotide"
  source: /note="Description of Combined DNA/RNA Molecule: Synthetic oligonucleotide"
gcaagauauuuuuauaauatt

SEQ ID NO: 392 - DNA, 21 bp, Artificial Sequence
  source: /note="Description of Artificial Sequence: Synthetic oligonucleotide"
  source: /note="Description of Combined DNA/RNA Molecule: Synthetic oligonucleotide"
aauguuuuugucaaguacatt

SEQ ID NO: 393 - DNA, 21 bp, Artificial Sequence
  source: /note="Description of Artificial Sequence: Synthetic oligonucleotide"
  source: /note="Description of Combined DNA/RNA Molecule: Synthetic oligonucleotide"
uuaaacaacaaguaccuuutt

SEQ ID NO: 394 - DNA, 21 bp, Artificial Sequence
  source: /note="Description of Artificial Sequence: Synthetic oligonucleotide"
  source: /note="Description of Combined DNA/RNA Molecule: Synthetic oligonucleotide"
ucagaaagucugugaaggatt

SEQ ID NO: 395 - DNA, 21 bp, Artificial Sequence
  source: /note="Description of Artificial Sequence: Synthetic oligonucleotide"
  source: /note="Description of Combined DNA/RNA Molecule: Synthetic oligonucleotide"
acugaagcauuugaugcaatt

SEQ ID NO: 396 - DNA, 21 bp, Artificial Sequence
  source: /note="Description of Artificial Sequence: Synthetic oligonucleotide"
  source: /note="Description of Combined DNA/RNA Molecule: Synthetic oligonucleotide"
aguucuguguuaaaauguctt

SEQ ID NO: 397 - DNA, 21 bp, Artificial Sequence
  source: /note="Description of Artificial Sequence: Synthetic oligonucleotide"
  source: /note="Description of Combined DNA/RNA Molecule: Synthetic oligonucleotide"
gauuuugaguguaaaaggatt

SEQ ID NO: 398 - DNA, 21 bp, Artificial Sequence
  source: /note="Description of Artificial Sequence: Synthetic oligonucleotide"
  source: /note="Description of Combined DNA/RNA Molecule: Synthetic oligonucleotide"
ugaugaaccuuguaaagaatt

SEQ ID NO: 399 - DNA, 21 bp, Artificial Sequence
  source: /note="Description of Artificial Sequence: Synthetic oligonucleotide"
  source: /note="Description of Combined DNA/RNA Molecule: Synthetic oligonucleotide"
cauuggaacauuuuucauutt

SEQ ID NO: 400 - DNA, 21 bp, Artificial Sequence
  source: /note="Description of Artificial Sequence: Synthetic oligonucleotide"
  source: /note="Description of Combined DNA/RNA Molecule: Synthetic oligonucleotide"
ccagaaauucggaguuauutt

SEQ ID NO: 401 - DNA, 21 bp, Artificial Sequence
  source: /note="Description of Artificial Sequence: Synthetic oligonucleotide"
  source: /note="Description of Combined DNA/RNA Molecule: Synthetic oligonucleotide"
ccugggagauaaaacucactt

SEQ ID NO: 402 - DNA, 21 bp, Artificial Sequence
  source: /note="Description of Artificial Sequence: Synthetic oligonucleotide"
  source: /note="Description of Combined DNA/RNA Molecule: Synthetic oligonucleotide"
aaaugaugaaccuuguaaatt

SEQ ID NO: 403 - DNA, 21 bp, Artificial Sequence
  source: /note="Description of Artificial Sequence: Synthetic oligonucleotide"
  source: /note="Description of Combined DNA/RNA Molecule: Synthetic oligonucleotide"
ugcucaagucacauuugautt

SEQ ID NO: 404 - DNA, 21 bp, Artificial Sequence
  source: /note="Description of Artificial Sequence: Synthetic oligonucleotide"
  source: /note="Description of Combined DNA/RNA Molecule: Synthetic oligonucleotide"
gauugcauaugcuuauaaatt

SEQ ID NO: 405 - DNA, 21 bp, Artificial Sequence
  source: /note="Description of Artificial Sequence: Synthetic oligonucleotide"
  source: /note="Description of Combined DNA/RNA Molecule: Synthetic oligonucleotide"
uauccugauaaaaaauuuatt

SEQ ID NO: 406 - DNA, 21 bp, Artificial Sequence
  source: /note="Description of Artificial Sequence: Synthetic oligonucleotide"
  source: /note="Description of Combined DNA/RNA Molecule: Synthetic oligonucleotide"
gaaguuugcagcuuuuauutt

SEQ ID NO: 407 - DNA, 21 bp, Artificial Sequence
  source: /note="Description of Artificial Sequence: Synthetic oligonucleotide"
  source: /note="Description of Combined DNA/RNA Molecule: Synthetic oligonucleotide"
agaaauugaucauauuggatt

SEQ ID NO: 408 - DNA, 21 bp, Artificial Sequence
  source: /note="Description of Artificial Sequence: Synthetic oligonucleotide"
  source: /note="Description of Combined DNA/RNA Molecule: Synthetic oligonucleotide"
ccugauaaaaaauuuaguutt

SEQ ID NO: 409 - DNA, 21 bp, Artificial Sequence
  source: /note="Description of Artificial Sequence: Synthetic oligonucleotide"
  source: /note="Description of Combined DNA/RNA Molecule: Synthetic oligonucleotide"
gaaaagaaaucuuaguaaatt

SEQ ID NO: 410 - DNA, 21 bp, Artificial Sequence
  source: /note="Description of Artificial Sequence: Synthetic oligonucleotide"
  source: /note="Description of Combined DNA/RNA Molecule: Synthetic oligonucleotide"
uuaucaaaguauaaacauutt

SEQ ID NO: 411 - DNA, 21 bp, Artificial Sequence
  source: /note="Description of Artificial Sequence: Synthetic oligonucleotide"
  source: /note="Description of Combined DNA/RNA Molecule: Synthetic oligonucleotide"
ccuacaaacugaauuuggutt

SEQ ID NO: 412 - DNA, 21 bp, Artificial Sequence
  source: /note="Description of Artificial Sequence: Synthetic oligonucleotide"
  source: /note="Description of Combined DNA/RNA Molecule: Synthetic oligonucleotide"
ggagcaaacauaugucauutt

SEQ ID NO: 413 - DNA, 21 bp, Artificial Sequence
  source: /note="Description of Artificial Sequence: Synthetic oligonucleotide"
  source: /note="Description of Combined DNA/RNA Molecule: Synthetic oligonucleotide"
auguaacaacuguaguucatt

SEQ ID NO: 414 - DNA, 21 bp, Artificial Sequence
  source: /note="Description of Artificial Sequence: Synthetic oligonucleotide"
  source: /note="Description of Combined DNA/RNA Molecule: Synthetic oligonucleotide"
ggaaaucauuggaacauuutt

SEQ ID NO: 415 - DNA, 21 bp, Artificial Sequence
  source: /note="Description of Artificial Sequence: Synthetic oligonucleotide"
  source: /note="Description of Combined DNA/RNA Molecule: Synthetic oligonucleotide"
uaagaauuuugaaauuacutt

SEQ ID NO: 416 - DNA, 21 bp, Artificial Sequence
  source: /note="Description of Artificial Sequence: Synthetic oligonucleotide"
  source: /note="Description of Combined DNA/RNA Molecule: Synthetic oligonucleotide"
uucugcaacugaauucgautt

SEQ ID NO: 417 - DNA, 21 bp, Artificial Sequence
  source: /note="Description of Artificial Sequence: Synthetic oligonucleotide"
  source: /note="Description of Combined DNA/RNA Molecule: Synthetic oligonucleotide"
ccuuggaaagaguauuucatt

SEQ ID NO: 418 - DNA, 21 bp, Artificial Sequence
  source: /note="Description of Artificial Sequence: Synthetic oligonucleotide"
  source: /note="Description of Combined DNA/RNA Molecule: Synthetic oligonucleotide"
ugauaaaaaauuuaguuactt

SEQ ID NO: 419 - DNA, 21 bp, Artificial Sequence
  source: /note="Description of Artificial Sequence: Synthetic oligonucleotide"
  source: /note="Description of Combined DNA/RNA Molecule: Synthetic oligonucleotide"
cuuggaaagaguauuucaatt

SEQ ID NO: 420 - DNA, 21 bp, Artificial Sequence
  source: /note="Description of Artificial Sequence: Synthetic oligonucleotide"
  source: /note="Description of Combined DNA/RNA Molecule: Synthetic oligonucleotide"
cacuauaauuacuugauuutt

SEQ ID NO: 421 - DNA, 21 bp, Artificial Sequence
  source: /note="Description of Artificial Sequence: Synthetic oligonucleotide"
  source: /note="Description of Combined DNA/RNA Molecule: Synthetic oligonucleotide"
uaacucacuauaauuacuutt

SEQ ID NO: 422 - DNA, 21 bp, Artificial Sequence
  source: /note="Description of Artificial Sequence: Synthetic oligonucleotide"
  source: /note="Description of Combined DNA/RNA Molecule: Synthetic oligonucleotide"
acaaaauaacucacuauaatt

SEQ ID NO: 423 - DNA, 21 bp, Artificial Sequence
  source: /note="Description of Artificial Sequence: Synthetic oligonucleotide"
  source: /note="Description of Combined DNA/RNA Molecule: Synthetic oligonucleotide"
uccucuggaaauuggccuutt

SEQ ID NO: 424 - DNA, 21 bp, Artificial Sequence
  source: /note="Description of Artificial Sequence: Synthetic oligonucleotide"
  source: /note="Description of Combined DNA/RNA Molecule: Synthetic oligonucleotide"
caaaauaacucacuauaautt

SEQ ID NO: 425 - DNA, 21 bp, Artificial Sequence
  source: /note="Description of Artificial Sequence: Synthetic oligonucleotide"
  source: /note="Description of Combined DNA/RNA Molecule: Synthetic oligonucleotide"
cucuggaaauuggccuucatt

SEQ ID NO: 426 - DNA, 21 bp, Artificial Sequence
  source: /note="Description of Artificial Sequence: Synthetic oligonucleotide"
  source: /note="Description of Combined DNA/RNA Molecule: Synthetic oligonucleotide"
gcaagauauuuuuauaauatt

SEQ ID NO: 427 - DNA, 21 bp, Artificial Sequence
  source: /note="Description of Artificial Sequence: Synthetic oligonucleotide"
  source: /note="Description of Combined DNA/RNA Molecule: Synthetic oligonucleotide"
aauguuuuugucaaguacatt

SEQ ID NO: 428 - DNA, 21 bp, Artificial Sequence
  source: /note="Description of Artificial Sequence: Synthetic oligonucleotide"
  source: /note="Description of Combined DNA/RNA Molecule: Synthetic oligonucleotide"
uuaaacaacaaguaccuuutt

SEQ ID NO: 429 - DNA, 21 bp, Artificial Sequence
  source: /note="Description of Artificial Sequence: Synthetic oligonucleotide"
  source: /note="Description of Combined DNA/RNA Molecule: Synthetic oligonucleotide"
ucagaaagucugugaaggatt

SEQ ID NO: 430 - DNA, 21 bp, Artificial Sequence
  source: /note="Description of Artificial Sequence: Synthetic oligonucleotide"
  source: /note="Description of Combined DNA/RNA Molecule: Synthetic oligonucleotide"
acugaagcauuugaugcaatt

SEQ ID NO: 431 - DNA, 21 bp, Artificial Sequence
  source: /note="Description of Artificial Sequence: Synthetic oligonucleotide"
  source: /note="Description of Combined DNA/RNA Molecule: Synthetic oligonucleotide"
aguucuguguuaaaauguctt

SEQ ID NO: 432 - DNA, 21 bp, Artificial Sequence
  source: /note="Description of Artificial Sequence: Synthetic oligonucleotide"
  source: /note="Description of Combined DNA/RNA Molecule: Synthetic oligonucleotide"
cacuauaauuacuugauuutt

SEQ ID NO: 433 - DNA, 21 bp, Artificial Sequence
  source: /note="Description of Artificial Sequence: Synthetic oligonucleotide"
  source: /note="Description of Combined DNA/RNA Molecule: Synthetic oligonucleotide"
uaacucacuauaauuacuutt

SEQ ID NO: 434 - DNA, 21 bp, Artificial Sequence
  source: /note="Description of Artificial Sequence: Synthetic oligonucleotide"
  source: /note="Description of Combined DNA/RNA Molecule: Synthetic oligonucleotide"
acaaaauaacucacuauaatt

SEQ ID NO: 435 - DNA, 21 bp, Artificial Sequence
  source: /note="Description of Artificial Sequence: Synthetic oligonucleotide"
  source: /note="Description of Combined DNA/RNA Molecule: Synthetic oligonucleotide"
uccucuggaaauuggccuutt

SEQ ID NO: 436 - DNA, 21 bp, Artificial Sequence
  source: /note="Description of Artificial Sequence: Synthetic oligonucleotide"
  source: /note="Description of Combined DNA/RNA Molecule: Synthetic oligonucleotide"
caaaauaacucacuauaautt

SEQ ID NO: 437 - DNA, 21 bp, Artificial Sequence
  source: /note="Description of Artificial Sequence: Synthetic oligonucleotide"
  source: /note="Description of Combined DNA/RNA Molecule: Synthetic oligonucleotide"
cucuggaaauuggccuucatt

SEQ ID NO: 438 - DNA, 21 bp, Artificial Sequence
  source: /note="Description of Artificial Sequence: Synthetic oligonucleotide"
  source: /note="Description of Combined DNA/RNA Molecule: Synthetic oligonucleotide"
gcaagauauuuuuauaauatt

SEQ ID NO: 439 - DNA, 21 bp, Artificial Sequence
  source: /note="Description of Artificial Sequence: Synthetic oligonucleotide"
  source: /note="Description of Combined DNA/RNA Molecule: Synthetic oligonucleotide"
aauguuuuugucaaguacatt

SEQ ID NO: 440 - DNA, 21 bp, Artificial Sequence
  source: /note="Description of Artificial Sequence: Synthetic oligonucleotide"
  source: /note="Description of Combined DNA/RNA Molecule: Synthetic oligonucleotide"
uuaaacaacaaguaccuuutt

SEQ ID NO: 441 - DNA, 21 bp, Artificial Sequence
  source: /note="Description of Artificial Sequence: Synthetic oligonucleotide"
  source: /note="Description of Combined DNA/RNA Molecule: Synthetic oligonucleotide"
ucagaaagucugugaaggatt

SEQ ID NO: 442 - DNA, 21 bp, Artificial Sequence
  source: /note="Description of Artificial Sequence: Synthetic oligonucleotide"
  source: /note="Description of Combined DNA/RNA Molecule: Synthetic oligonucleotide"
acugaagcauuugaugcaatt

SEQ ID NO: 443 - DNA, 21 bp, Artificial Sequence
  source: /note="Description of Artificial Sequence: Synthetic oligonucleotide"
  source: /note="Description of Combined DNA/RNA Molecule: Synthetic oligonucleotide"
aguucuguguuaaaauguctt

SEQ ID NO: 444 - DNA, 21 bp, Artificial Sequence
  source: /note="Description of Artificial Sequence: Synthetic oligonucleotide"
  source: /note="Description of Combined DNA/RNA Molecule: Synthetic oligonucleotide"
cacuauaauuacuugauuutt

SEQ ID NO: 445 - DNA, 21 bp, Artificial Sequence
  source: /note="Description of Artificial Sequence: Synthetic oligonucleotide"
  source: /note="Description of Combined DNA/RNA Molecule: Synthetic oligonucleotide"
uaacucacuauaauuacuutt

SEQ ID NO: 446 - DNA, 21 bp, Artificial Sequence
  source: /note="Description of Artificial Sequence: Synthetic oligonucleotide"
  source: /note="Description of Combined DNA/RNA Molecule: Synthetic oligonucleotide"
acaaaauaacucacuauaatt

SEQ ID NO: 447 - DNA, 21 bp, Artificial Sequence
  source: /note="Description of Artificial Sequence: Synthetic oligonucleotide"
  source: /note="Description of Combined DNA/RNA Molecule: Synthetic oligonucleotide"
uccucuggaaauuggccuutt

SEQ ID NO: 448 - DNA, 21 bp, Artificial Sequence
  source: /note="Description of Artificial Sequence: Synthetic oligonucleotide"
  source: /note="Description of Combined DNA/RNA Molecule: Synthetic oligonucleotide"
caaaauaacucacuauaautt

SEQ ID NO: 449 - DNA, 21 bp, Artificial Sequence
  source: /note="Description of Artificial Sequence: Synthetic oligonucleotide"
  source: /note="Description of Combined DNA/RNA Molecule: Synthetic oligonucleotide"
cucuggaaauuggccuucatt

SEQ ID NO: 450 - DNA, 21 bp, Artificial Sequence
  source: /note="Description of Artificial Sequence: Synthetic oligonucleotide"
  source: /note="Description of Combined DNA/RNA Molecule: Synthetic oligonucleotide"
gcaagauauuuuuauaauatt

SEQ ID NO: 451 - DNA, 21 bp, Artificial Sequence
  source: /note="Description of Artificial Sequence: Synthetic oligonucleotide"
  source: /note="Description of Combined DNA/RNA Molecule: Synthetic oligonucleotide"
aauguuuuugucaaguacatt

SEQ ID NO: 452 - DNA, 21 bp, Artificial Sequence
  source: /note="Description of Artificial Sequence: Synthetic oligonucleotide"
  source: /note="Description of Combined DNA/RNA Molecule: Synthetic oligonucleotide"
uuaaacaacaaguaccuuutt

SEQ ID NO: 453 - DNA, 21 bp, Artificial Sequence
  source: /note="Description of Artificial Sequence: Synthetic oligonucleotide"
  source: /note="Description of Combined DNA/RNA Molecule: Synthetic oligonucleotide"
ucagaaagucugugaaggatt

SEQ ID NO: 454 - DNA, 21 bp, Artificial Sequence
  source: /note="Description of Artificial Sequence: Synthetic oligonucleotide"
  source: /note="Description of Combined DNA/RNA Molecule: Synthetic oligonucleotide"
acugaagcauuugaugcaatt

SEQ ID NO: 455 - DNA, 21 bp, Artificial Sequence
  source: /note="Description of Artificial Sequence: Synthetic oligonucleotide"
  source: /note="Description of Combined DNA/RNA Molecule: Synthetic oligonucleotide"
aguucuguguuaaaauguctt

SEQ ID NO: 456 - DNA, 21 bp, Artificial Sequence
  source: /note="Description of Artificial Sequence: Synthetic oligonucleotide"
  source: /note="Description of Combined DNA/RNA Molecule: Synthetic oligonucleotide"
cacuauaauuacuugauuutt

SEQ ID NO: 457 - DNA, 21 bp, Artificial Sequence
  source: /note="Description of Artificial Sequence: Synthetic oligonucleotide"
  source: /note="Description of Combined DNA/RNA Molecule: Synthetic oligonucleotide"
uaacucacuauaauuacuutt

SEQ ID NO: 458 - DNA, 21 bp, Artificial Sequence
  source: /note="Description of Artificial Sequence: Synthetic oligonucleotide"
  source: /note="Description of Combined DNA/RNA Molecule: Synthetic oligonucleotide"
acaaaauaacucacuauaatt

SEQ ID NO: 459 - DNA, 21 bp, Artificial Sequence
  source: /note="Description of Artificial Sequence: Synthetic oligonucleotide"
  source: /note="Description of Combined DNA/RNA Molecule: Synthetic oligonucleotide"
uccucuggaaauuggccuutt

SEQ ID NO: 460 - DNA, 21 bp, Artificial Sequence
  source: /note="Description of Artificial Sequence: Synthetic oligonucleotide"
  source: /note="Description of Combined DNA/RNA Molecule: Synthetic oligonucleotide"
caaaauaacucacuauaautt

SEQ ID NO: 461 - DNA, 21 bp, Artificial Sequence
  source: /note="Description of Artificial Sequence: Synthetic oligonucleotide"
  source: /note="Description of Combined DNA/RNA Molecule: Synthetic oligonucleotide"
cucuggaaauuggccuucatt

SEQ ID NO: 462 - DNA, 21 bp, Artificial Sequence
  source: /note="Description of Artificial Sequence: Synthetic oligonucleotide"
  source: /note="Description of Combined DNA/RNA Molecule: Synthetic oligonucleotide"
gcaagauauuuuuauaauatt

SEQ ID NO: 463 - DNA, 21 bp, Artificial Sequence
  source: /note="Description of Artificial Sequence: Synthetic oligonucleotide"
  source: /note="Description of Combined DNA/RNA Molecule: Synthetic oligonucleotide"
aauguuuuugucaaguacatt

SEQ ID NO: 464 - DNA, 21 bp, Artificial Sequence
  source: /note="Description of Artificial Sequence: Synthetic oligonucleotide"
  source: /note="Description of Combined DNA/RNA Molecule: Synthetic oligonucleotide"
uuaaacaacaaguaccuuutt

SEQ ID NO: 465 - DNA, 21 bp, Artificial Sequence
  source: /note="Description of Artificial Sequence: Synthetic oligonucleotide"
  source: /note="Description of Combined DNA/RNA Molecule: Synthetic oligonucleotide"
ucagaaagucugugaaggatt

SEQ ID NO: 466 - DNA, 21 bp, Artificial Sequence
  source: /note="Description of Artificial Sequence: Synthetic oligonucleotide"
  source: /note="Description of Combined DNA/RNA Molecule: Synthetic oligonucleotide"
acugaagcauuugaugcaatt

SEQ ID NO: 467 - DNA, 21 bp, Artificial Sequence
  source: /note="Description of Artificial Sequence: Synthetic oligonucleotide"
  source: /note="Description of Combined DNA/RNA Molecule: Synthetic oligonucleotide"
aguucuguguuaaaauguctt

SEQ ID NO: 468 - DNA, 21 bp, Artificial Sequence
  source: /note="Description of Artificial Sequence: Synthetic oligonucleotide"
  source: /note="Description of Combined DNA/RNA Molecule: Synthetic oligonucleotide"
aaaucaaguaauuauagugtt

SEQ ID NO: 469 - DNA, 21 bp, Artificial Sequence
  source: /note="Description of Artificial Sequence: Synthetic oligonucleotide"
  source: /note="Description of Combined DNA/RNA Molecule: Synthetic oligonucleotide"
aaguaauuauagugaguuatt

SEQ ID NO: 470 - DNA, 21 bp, Artificial Sequence
  source: /note="Description of Artificial Sequence: Synthetic oligonucleotide"
  source: /note="Description of Combined DNA/RNA Molecule: Synthetic oligonucleotide"
uuauagugaguuauuuugutt

SEQ ID NO: 471 - DNA, 21 bp, Artificial Sequence
  source: /note="Description of Artificial Sequence: Synthetic oligonucleotide"
  source: /note="Description of Combined DNA/RNA Molecule: Synthetic oligonucleotide"
aaggccaauuuccagaggatt

SEQ ID NO: 472 - DNA, 21 bp, Artificial Sequence
  source: /note="Description of Artificial Sequence: Synthetic oligonucleotide"
  source: /note="Description of Combined DNA/RNA Molecule: Synthetic oligonucleotide"
auuauagugaguuauuuugtt

SEQ ID NO: 473 - DNA, 21 bp, Artificial Sequence
  source: /note="Description of Artificial Sequence: Synthetic oligonucleotide"
  source: /note="Description of Combined DNA/RNA Molecule: Synthetic oligonucleotide"
ugaaggccaauuuccagagtt

SEQ ID NO: 474 - DNA, 21 bp, Artificial Sequence
  source: /note="Description of Artificial Sequence: Synthetic oligonucleotide"
  source: /note="Description of Combined DNA/RNA Molecule: Synthetic oligonucleotide"
uauuauaaaaauaucuugctt

SEQ ID NO: 475 - DNA, 21 bp, Artificial Sequence
  source: /note="Description of Artificial Sequence: Synthetic oligonucleotide"
  source: /note="Description of Combined DNA/RNA Molecule: Synthetic oligonucleotide"
uguacuugacaaaaacauutt

SEQ ID NO: 476 - DNA, 21 bp, Artificial Sequence
  source: /note="Description of Artificial Sequence: Synthetic oligonucleotide"
  source: /note="Description of Combined DNA/RNA Molecule: Synthetic oligonucleotide"
aaagguacuuguuguuuaatt

SEQ ID NO: 477 - DNA, 21 bp, Artificial Sequence
  source: /note="Description of Artificial Sequence: Synthetic oligonucleotide"
  source: /note="Description of Combined DNA/RNA Molecule: Synthetic oligonucleotide"
uccuucacagacuuucugatt

SEQ ID NO: 478 - DNA, 21 bp, Artificial Sequence
  source: /note="Description of Artificial Sequence: Synthetic oligonucleotide"
  source: /note="Description of Combined DNA/RNA Molecule: Synthetic oligonucleotide"
uugcaucaaaugcuucagutt

SEQ ID NO: 479 - DNA, 21 bp, Artificial Sequence
  source: /note="Description of Artificial Sequence: Synthetic oligonucleotide"
  source: /note="Description of Combined DNA/RNA Molecule: Synthetic oligonucleotide"
gacauuuuaacacagaacutt

SEQ ID NO: 480 - DNA, 21 bp, Artificial Sequence
  source: /note="Description of Artificial Sequence: Synthetic oligonucleotide"
  source: /note="Description of Combined DNA/RNA Molecule: Synthetic oligonucleotide"
uccuuuuacacucaaaauctt

SEQ ID NO: 481 - DNA, 21 bp, Artificial Sequence
  source: /note="Description of Artificial Sequence: Synthetic oligonucleotide"
  source: /note="Description of Combined DNA/RNA Molecule: Synthetic oligonucleotide"
uucuuuacaagguucaucatt

SEQ ID NO: 482 - DNA, 21 bp, Artificial Sequence
  source: /note="Description of Artificial Sequence: Synthetic oligonucleotide"
  source: /note="Description of Combined DNA/RNA Molecule: Synthetic oligonucleotide"
aaugaaaaauguuccaaugtt

SEQ ID NO: 483 - DNA, 21 bp, Artificial Sequence
  source: /note="Description of Artificial Sequence: Synthetic oligonucleotide"
  source: /note="Description of Combined DNA/RNA Molecule: Synthetic oligonucleotide"
aauaacuccgaauuucuggtt

SEQ ID NO: 484 - DNA, 21 bp, Artificial Sequence
  source: /note="Description of Artificial Sequence: Synthetic oligonucleotide"
  source: /note="Description of Combined DNA/RNA Molecule: Synthetic oligonucleotide"
gugaguuuuaucucccaggtt

SEQ ID NO: 485 - DNA, 21 bp, Artificial Sequence
  source: /note="Description of Artificial Sequence: Synthetic oligonucleotide"
  source: /note="Description of Combined DNA/RNA Molecule: Synthetic oligonucleotide"
uuuacaagguucaucauuutt

SEQ ID NO: 486 - DNA, 21 bp, Artificial Sequence
  source: /note="Description of Artificial Sequence: Synthetic oligonucleotide"
  source: /note="Description of Combined DNA/RNA Molecule: Synthetic oligonucleotide"
aucaaaugugacuugagcatt

SEQ ID NO: 487 - DNA, 21 bp, Artificial Sequence
  source: /note="Description of Artificial Sequence: Synthetic oligonucleotide"
  source: /note="Description of Combined DNA/RNA Molecule: Synthetic oligonucleotide"
uuuauaagcauaugcaauctt

SEQ ID NO: 488 - DNA, 21 bp, Artificial Sequence
  source: /note="Description of Artificial Sequence: Synthetic oligonucleotide"
  source: /note="Description of Combined DNA/RNA Molecule: Synthetic oligonucleotide"
uaaauuuuuuaucaggauatt

SEQ ID NO: 489 - DNA, 21 bp, Artificial Sequence
  source: /note="Description of Artificial Sequence: Synthetic oligonucleotide"
  source: /note="Description of Combined DNA/RNA Molecule: Synthetic oligonucleotide"
aauaaaagcugcaaacuuctt

SEQ ID NO: 490 - DNA, 21 bp, Artificial Sequence
  source: /note="Description of Artificial Sequence: Synthetic oligonucleotide"
  source: /note="Description of Combined DNA/RNA Molecule: Synthetic oligonucleotide"
uccaauaugaucaauuucutt

SEQ ID NO: 491 - DNA, 21 bp, Artificial Sequence
  source: /note="Description of Artificial Sequence: Synthetic oligonucleotide"
  source: /note="Description of Combined DNA/RNA Molecule: Synthetic oligonucleotide"
aacuaaauuuuuuaucaggtt

SEQ ID NO: 492 - DNA, 21 bp, Artificial Sequence
  source: /note="Description of Artificial Sequence: Synthetic oligonucleotide"
  source: /note="Description of Combined DNA/RNA Molecule: Synthetic oligonucleotide"
uuuacuaagauuucuuuuctt

SEQ ID NO: 493 - DNA, 21 bp, Artificial Sequence
  source: /note="Description of Artificial Sequence: Synthetic oligonucleotide"
  source: /note="Description of Combined DNA/RNA Molecule: Synthetic oligonucleotide"
aauguuuauacuuugauaatt

SEQ ID NO: 494 - DNA, 21 bp, Artificial Sequence
  source: /note="Description of Artificial Sequence: Synthetic oligonucleotide"
  source: /note="Description of Combined DNA/RNA Molecule: Synthetic oligonucleotide"
accaaauucaguuuguaggtt

SEQ ID NO: 495 - DNA, 21 bp, Artificial Sequence
  source: /note="Description of Artificial Sequence: Synthetic oligonucleotide"
  source: /note="Description of Combined DNA/RNA Molecule: Synthetic oligonucleotide"
aaugacauauguuugcucctt

SEQ ID NO: 496 - DNA, 21 bp, Artificial Sequence
  source: /note="Description of Artificial Sequence: Synthetic oligonucleotide"
  source: /note="Description of Combined DNA/RNA Molecule: Synthetic oligonucleotide"
ugaacuacaguuguuacautt

SEQ ID NO: 497 - DNA, 21 bp, Artificial Sequence
  source: /note="Description of Artificial Sequence: Synthetic oligonucleotide"
  source: /note="Description of Combined DNA/RNA Molecule: Synthetic oligonucleotide"
aaauguuccaaugauuucctt

SEQ ID NO: 498 - DNA, 21 bp, Artificial Sequence
  source: /note="Description of Artificial Sequence: Synthetic oligonucleotide"
  source: /note="Description of Combined DNA/RNA Molecule: Synthetic oligonucleotide"
aguaauuucaaaauucuuatt

SEQ ID NO: 499 - DNA, 21 bp, Artificial Sequence
  source: /note="Description of Artificial Sequence: Synthetic oligonucleotide"
  source: /note="Description of Combined DNA/RNA Molecule: Synthetic oligonucleotide"
aucgaauucaguugcagaatt

SEQ ID NO: 500 - DNA, 21 bp, Artificial Sequence
  source: /note="Description of Artificial Sequence: Synthetic oligonucleotide"
  source: /note="Description of Combined DNA/RNA Molecule: Synthetic oligonucleotide"
ugaaauacucuuuccaaggtt

SEQ ID NO: 501 - DNA, 21 bp, Artificial Sequence
  source: /note="Description of Artificial Sequence: Synthetic oligonucleotide"
  source: /note="Description of Combined DNA/RNA Molecule: Synthetic oligonucleotide"
guaacuaaauuuuuuaucatt

SEQ ID NO: 502 - DNA, 21 bp, Artificial Sequence
  source: /note="Description of Artificial Sequence: Synthetic oligonucleotide"
  source: /note="Description of Combined DNA/RNA Molecule: Synthetic oligonucleotide"
uugaaauacucuuuccaagtt

SEQ ID NO: 503 - DNA, 21 bp, Artificial Sequence
  source: /note="Description of Artificial Sequence: Synthetic oligonucleotide"
  source: /note="Description of Combined DNA/RNA Molecule: Synthetic oligonucleotide"
aaaucaaguaauuauagugtt

SEQ ID NO: 504 - DNA, 21 bp, Artificial Sequence
  source: /note="Description of Artificial Sequence: Synthetic oligonucleotide"
  source: /note="Description of Combined DNA/RNA Molecule: Synthetic oligonucleotide"
aaguaauuauagugaguuatt

SEQ ID NO: 505 - DNA, 21 bp, Artificial Sequence
  source: /note="Description of Artificial Sequence: Synthetic oligonucleotide"
  source: /note="Description of Combined DNA/RNA Molecule: Synthetic oligonucleotide"
uuauagugaguuauuuugutt

SEQ ID NO: 506 - DNA, 21 bp, Artificial Sequence
  source: /note="Description of Artificial Sequence: Synthetic oligonucleotide"
  source: /note="Description of Combined DNA/RNA Molecule: Synthetic oligonucleotide"
aaggccaauuuccagaggatt

SEQ ID NO: 507 - DNA, 21 bp, Artificial Sequence
  source: /note="Description of Artificial Sequence: Synthetic oligonucleotide"
  source: /note="Description of Combined DNA/RNA Molecule: Synthetic oligonucleotide"
auuauagugaguuauuuugtt

SEQ ID NO: 508 - DNA, 21 bp, Artificial Sequence
  source: /note="Description of Artificial Sequence: Synthetic oligonucleotide"
  source: /note="Description of Combined DNA/RNA Molecule: Synthetic oligonucleotide"
ugaaggccaauuuccagagtt

SEQ ID NO: 509 - DNA, 21 bp, Artificial Sequence
  source: /note="Description of Artificial Sequence: Synthetic oligonucleotide"
  source: /note="Description of Combined DNA/RNA Molecule: Synthetic oligonucleotide"
uauuauaaaaauaucuugctt

SEQ ID NO: 510 - DNA, 21 bp, Artificial Sequence
  source: /note="Description of Artificial Sequence: Synthetic oligonucleotide"
  source: /note="Description of Combined DNA/RNA Molecule: Synthetic oligonucleotide"
uguacuugacaaaaacauutt

SEQ ID NO: 511 - DNA, 21 bp, Artificial Sequence
  source: /note="Description of Artificial Sequence: Synthetic oligonucleotide"
  source: /note="Description of Combined DNA/RNA Molecule: Synthetic oligonucleotide"
aaagguacuuguuguuuaatt

SEQ ID NO: 512 - DNA, 21 bp, Artificial Sequence
  source: /note="Description of Artificial Sequence: Synthetic oligonucleotide"
  source: /note="Description of Combined DNA/RNA Molecule: Synthetic oligonucleotide"
uccuucacagacuuucugatt

SEQ ID NO: 513 - DNA, 21 bp, Artificial Sequence
  source: /note="Description of Artificial Sequence: Synthetic oligonucleotide"
  source: /note="Description of Combined DNA/RNA Molecule: Synthetic oligonucleotide"
uugcaucaaaugcuucagutt

SEQ ID NO: 514 - DNA, 21 bp, Artificial Sequence
  source: /note="Description of Artificial Sequence: Synthetic oligonucleotide"
  source: /note="Description of Combined DNA/RNA Molecule: Synthetic oligonucleotide"
gacauuuuaacacagaacutt

SEQ ID NO: 515 - DNA, 21 bp, Artificial Sequence
  source: /note="Description of Artificial Sequence: Synthetic oligonucleotide"
  source: /note="Description of Combined DNA/RNA Molecule: Synthetic oligonucleotide"
aaaucaaguaauuauagugtt

SEQ ID NO: 516 - DNA, 21 bp, Artificial Sequence
  source: /note="Description of Artificial Sequence: Synthetic oligonucleotide"
  source: /note="Description of Combined DNA/RNA Molecule: Synthetic oligonucleotide"
aaguaauuauagugaguuatt

SEQ ID NO: 517 - DNA, 21 bp, Artificial Sequence
  source: /note="Description of Artificial Sequence: Synthetic oligonucleotide"
  source: /note="Description of Combined DNA/RNA Molecule: Synthetic oligonucleotide"
uuauagugaguuauuuugutt

SEQ ID NO: 518 - DNA, 21 bp, Artificial Sequence
  source: /note="Description of Artificial Sequence: Synthetic oligonucleotide"
  source: /note="Description of Combined DNA/RNA Molecule: Synthetic oligonucleotide"
aaggccaauuuccagaggatt

SEQ ID NO: 519 - DNA, 21 bp, Artificial Sequence
  source: /note="Description of Artificial Sequence: Synthetic oligonucleotide"
  source: /note="Description of Combined DNA/RNA Molecule: Synthetic oligonucleotide"
auuauagugaguuauuuugtt

SEQ ID NO: 520 - DNA, 21 bp, Artificial Sequence
  source: /note="Description of Artificial Sequence: Synthetic oligonucleotide"
  source: /note="Description of Combined DNA/RNA Molecule: Synthetic oligonucleotide"
ugaaggccaauuuccagagtt

SEQ ID NO: 521 - DNA, 21 bp, Artificial Sequence
  source: /note="Description of Artificial Sequence: Synthetic oligonucleotide"
  source: /note="Description of Combined DNA/RNA Molecule: Synthetic oligonucleotide"
uauuauaaaaauaucuugctt

SEQ ID NO: 522 - DNA, 21 bp, Artificial Sequence
  source: /note="Description of Artificial Sequence: Synthetic oligonucleotide"
  source: /note="Description of Combined DNA/RNA Molecule: Synthetic oligonucleotide"
uguacuugacaaaaacauutt

SEQ ID NO: 523 - DNA, 21 bp, Artificial Sequence
  source: /note="Description of Artificial Sequence: Synthetic oligonucleotide"
  source: /note="Description of Combined DNA/RNA Molecule: Synthetic oligonucleotide"
aaagguacuuguuguuuaatt

SEQ ID NO: 524 - DNA, 21 bp, Artificial Sequence
  source: /note="Description of Artificial Sequence: Synthetic oligonucleotide"
  source: /note="Description of Combined DNA/RNA Molecule: Synthetic oligonucleotide"
uccuucacagacuuucugatt

SEQ ID NO: 525 - DNA, 21 bp, Artificial Sequence
  source: /note="Description of Artificial Sequence: Synthetic oligonucleotide"
  source: /note="Description of Combined DNA/RNA Molecule: Synthetic oligonucleotide"
uugcaucaaaugcuucagutt

SEQ ID NO: 526 - DNA, 21 bp, Artificial Sequence
  source: /note="Description of Artificial Sequence: Synthetic oligonucleotide"
  source: /note="Description of Combined DNA/RNA Molecule: Synthetic oligonucleotide"
gacauuuuaacacagaacutt

SEQ ID NO: 527 - DNA, 21 bp, Artificial Sequence
  source: /note="Description of Artificial Sequence: Synthetic oligonucleotide"
  source: /note="Description of Combined DNA/RNA Molecule: Synthetic oligonucleotide"
aaaucaaguaauuauagugtt

SEQ ID NO: 528 - DNA, 21 bp, Artificial Sequence
  source: /note="Description of Artificial Sequence: Synthetic oligonucleotide"
  source: /note="Description of Combined DNA/RNA Molecule: Synthetic oligonucleotide"
aaguaauuauagugaguuatt

SEQ ID NO: 529 - DNA, 21 bp, Artificial Sequence
  source: /note="Description of Artificial Sequence: Synthetic oligonucleotide"
  source: /note="Description of Combined DNA/RNA Molecule: Synthetic oligonucleotide"
uuauagugaguuauuuugutt

SEQ ID NO: 530 - DNA, 21 bp, Artificial Sequence
  source: /note="Description of Artificial Sequence: Synthetic oligonucleotide"
  source: /note="Description of Combined DNA/RNA Molecule: Synthetic oligonucleotide"
aaggccaauuuccagaggatt

SEQ ID NO: 531 - DNA, 21 bp, Artificial Sequence
  source: /note="Description of Artificial Sequence: Synthetic oligonucleotide"
  source: /note="Description of Combined DNA/RNA Molecule: Synthetic oligonucleotide"
auuauagugaguuauuuugtt

SEQ ID NO: 532 - DNA, 21 bp, Artificial Sequence
  source: /note="Description of Artificial Sequence: Synthetic oligonucleotide"
  source: /note="Description of Combined DNA/RNA Molecule: Synthetic oligonucleotide"
ugaaggccaauuuccagagtt

SEQ ID NO: 533 - DNA, 21 bp, Artificial Sequence
  source: /note="Description of Artificial Sequence: Synthetic oligonucleotide"
  source: /note="Description of Combined DNA/RNA Molecule: Synthetic oligonucleotide"
uauuauaaaaauaucuugctt

SEQ ID NO: 534 - DNA, 21 bp, Artificial Sequence
  source: /note="Description of Artificial Sequence: Synthetic oligonucleotide"
  source: /note="Description of Combined DNA/RNA Molecule: Synthetic oligonucleotide"
uguacuugacaaaaacauutt

SEQ ID NO: 535 - DNA, 21 bp, Artificial Sequence
  source: /note="Description of Artificial Sequence: Synthetic oligonucleotide"
  source: /note="Description of Combined DNA/RNA Molecule: Synthetic oligonucleotide"
aaagguacuuguuguuuaatt

SEQ ID NO: 536 - DNA, 21 bp, Artificial Sequence
  source: /note="Description of Artificial Sequence: Synthetic oligonucleotide"
  source: /note="Description of Combined DNA/RNA Molecule: Synthetic oligonucleotide"
uccuucacagacuuucugatt

SEQ ID NO: 537 - DNA, 21 bp, Artificial Sequence
  source: /note="Description of Artificial Sequence: Synthetic oligonucleotide"
  source: /note="Description of Combined DNA/RNA Molecule: Synthetic oligonucleotide"
uugcaucaaaugcuucagutt

SEQ ID NO: 538 - DNA, 21 bp, Artificial Sequence
  source: /note="Description of Artificial Sequence: Synthetic oligonucleotide"
  source: /note="Description of Combined DNA/RNA Molecule: Synthetic oligonucleotide"
gacauuuuaacacagaacutt

SEQ ID NO: 539 - DNA, 21 bp, Artificial Sequence
  source: /note="Description of Artificial Sequence: Synthetic oligonucleotide"
  source: /note="Description of Combined DNA/RNA Molecule: Synthetic oligonucleotide"
aaaucaaguaauuauagugtt

SEQ ID NO: 540 - DNA, 21 bp, Artificial Sequence
  source: /note="Description of Artificial Sequence: Synthetic oligonucleotide"
  source: /note="Description of Combined DNA/RNA Molecule: Synthetic oligonucleotide"
aaguaauuauagugaguuatt

SEQ ID NO: 541 - DNA, 21 bp, Artificial Sequence
  source: /note="Description of Artificial Sequence: Synthetic oligonucleotide"
  source: /note="Description of Combined DNA/RNA Molecule: Synthetic oligonucleotide"
uuauagugaguuauuuugutt

SEQ ID NO: 542 - DNA, 21 bp, Artificial Sequence
  source: /note="Description of Artificial Sequence: Synthetic oligonucleotide"
  source: /note="Description of Combined DNA/RNA Molecule: Synthetic oligonucleotide"
aaggccaauuuccagaggatt

SEQ ID NO: 543 - DNA, 21 bp, Artificial Sequence
  source: /note="Description of Artificial Sequence: Synthetic oligonucleotide"
  source: /note="Description of Combined DNA/RNA Molecule: Synthetic oligonucleotide"
auuauagugaguuauuuugtt

SEQ ID NO: 544 - DNA, 21 bp, Artificial Sequence
  source: /note="Description of Artificial Sequence: Synthetic oligonucleotide"
  source: /note="Description of Combined DNA/RNA Molecule: Synthetic oligonucleotide"
ugaaggccaauuuccagagtt

SEQ ID NO: 545 - DNA, 21 bp, Artificial Sequence
  source: /note="Description of Artificial Sequence: Synthetic oligonucleotide"
  source: /note="Description of Combined DNA/RNA Molecule: Synthetic oligonucleotide"
uauuauaaaaauaucuugctt

SEQ ID NO: 546 - DNA, 21 bp, Artificial Sequence
  source: /note="Description of Artificial Sequence: Synthetic oligonucleotide"
  source: /note="Description of Combined DNA/RNA Molecule: Synthetic oligonucleotide"
uguacuugacaaaaacauutt

SEQ ID NO: 547 - DNA, 21 bp, Artificial Sequence
  source: /note="Description of Artificial Sequence: Synthetic oligonucleotide"
  source: /note="Description of Combined DNA/RNA Molecule: Synthetic oligonucleotide"
aaagguacuuguuguuuaatt

SEQ ID NO: 548 - DNA, 21 bp, Artificial Sequence
  source: /note="Description of Artificial Sequence: Synthetic oligonucleotide"
  source: /note="Description of Combined DNA/RNA Molecule: Synthetic oligonucleotide"
uccuucacagacuuucugatt

SEQ ID NO: 549 - DNA, 21 bp, Artificial Sequence
  source: /note="Description of Artificial Sequence: Synthetic oligonucleotide"
  source: /note="Description of Combined DNA/RNA Molecule: Synthetic oligonucleotide"
uugcaucaaaugcuucagutt

SEQ ID NO: 550 - DNA, 21 bp, Artificial Sequence
  source: /note="Description of Artificial Sequence: Synthetic oligonucleotide"
  source: /note="Description of Combined DNA/RNA Molecule: Synthetic oligonucleotide"
gacauuuuaacacagaacutt

SEQ ID NO: 551 - RNA, 21 nt, Artificial Sequence
  source: /note="Description of Artificial Sequence: Synthetic oligonucleotide"
gacaaaauaacucacuauaau

SEQ ID NO: 552 - RNA, 21 nt, Artificial Sequence
  source: /note="Description of Artificial Sequence: Synthetic oligonucleotide"
gacaaaauaacucacuauaau

SEQ ID NO: 553 - RNA, 21 nt, Artificial Sequence
  source: /note="Description of Artificial Sequence: Synthetic oligonucleotide"
cagaucaaacacaauuucagu

SEQ ID NO: 554 - RNA, 21 nt, Artificial Sequence
  source: /note="Description of Artificial Sequence: Synthetic oligonucleotide"
cagaucaaacacaauuucagu

SEQ ID NO: 555 - RNA, 23 nt, Artificial Sequence
  source: /note="Description of Artificial Sequence: Synthetic oligonucleotide"
auuauagugaguuauuuugucaa

SEQ ID NO: 556 - RNA, 23 nt, Artificial Sequence
  source: /note="Description of Artificial Sequence: Synthetic oligonucleotide"
auuauagugaguuauuuugucaa

SEQ ID NO: 557 - RNA, 23 nt, Artificial Sequence
  source: /note="Description of Artificial Sequence: Synthetic oligonucleotide"
acugaaauuguguuugaucugca

SEQ ID NO: 558 - RNA, 23 nt, Artificial Sequence
  source: /note="Description of Artificial Sequence: Synthetic oligonucleotide"
acugaaauuguguuugaucugca

SEQ ID NO: 559 - RNA, 21 nt, Artificial Sequence
  source: /note="Description of Artificial Sequence: Synthetic oligonucleotide"
auuuaaacaacaaguaccuuu

SEQ ID NO: 560 - RNA, 21 nt, Artificial Sequence
  source: /note="Description of Artificial Sequence: Synthetic oligonucleotide"
auuuaaacaacaaguaccuuu

SEQ ID NO: 561 - RNA, 21 nt, Artificial Sequence
  source: /note="Description of Artificial Sequence: Synthetic oligonucleotide"
auuuaaacaacaaguaccuuu

SEQ ID NO: 562 - RNA, 21 nt, Artificial Sequence
  source: /note="Description of Artificial Sequence: Synthetic oligonucleotide"
ugacaaaauaacucacuauaa

SEQ ID NO: 563 - RNA, 21 nt, Artificial Sequence
  source: /note="Description of Artificial Sequence: Synthetic oligonucleotide"
ugacaaaauaacucacuauaa

SEQ ID NO: 564 - RNA, 21 nt, Artificial Sequence
  source: /note="Description of Artificial Sequence: Synthetic oligonucleotide"
ugacaaaauaacucacuauaa

SEQ ID NO: 565 - RNA, 21 nt, Artificial Sequence
  source: /note="Description of Artificial Sequence: Synthetic oligonucleotide"
gacaaaauaacucacuauaau

SEQ ID NO: 566 - RNA, 21 nt, Artificial Sequence
  source: /note="Description of Artificial Sequence: Synthetic oligonucleotide"
gacaaaauaacucacuauaau

SEQ ID NO: 567 - RNA, 21 nt, Artificial Sequence
  source: /note="Description of Artificial Sequence: Synthetic oligonucleotide"
gacaaaauaacucacuauaau

SEQ ID NO: 568 - RNA, 21 nt, Artificial Sequence
  source: /note="Description of Artificial Sequence: Synthetic oligonucleotide"
guuccggauauuugaacuuuu

SEQ ID NO: 569 - RNA, 21 nt, Artificial Sequence
  source: /note="Description of Artificial Sequence: Synthetic oligonucleotide"
guuccggauauuugaacuuuu

SEQ ID NO: 570 - RNA, 21 nt, Artificial Sequence
  source: /note="Description of Artificial Sequence: Synthetic oligonucleotide"
guuccggauauuugaacuuuu

SEQ ID NO: 571 - RNA, 21 nt, Artificial Sequence
  source: /note="Description of Artificial Sequence: Synthetic oligonucleotide"
ugcagaucaaacacaauuuca

SEQ ID NO: 572 - RNA, 21 nt, Artificial Sequence
  source: /note="Description of Artificial Sequence: Synthetic oligonucleotide"
ugcagaucaaacacaauuuca

SEQ ID NO: 573 - RNA, 21 nt, Artificial Sequence
  source: /note="Description of Artificial Sequence: Synthetic oligonucleotide"
ugcagaucaaacacaauuuca

SEQ ID NO: 574 - RNA, 21 nt, Artificial Sequence
  source: /note="Description of Artificial Sequence: Synthetic oligonucleotide"
aagcaagauauuuuuauaaua

SEQ ID NO: 575 - RNA, 21 nt, Artificial Sequence
  source: /note="Description of Artificial Sequence: Synthetic oligonucleotide"
aagcaagauauuuuuauaaua

SEQ ID NO: 576 - RNA, 21 nt, Artificial Sequence
  source: /note="Description of Artificial Sequence: Synthetic oligonucleotide"
aagcaagauauuuuuauaaua

SEQ ID NO: 577 - RNA, 21 nt, Artificial Sequence
  source: /note="Description of Artificial Sequence: Synthetic oligonucleotide"
cagaucaaacacaauuucagu

SEQ ID NO: 578 - RNA, 21 nt, Artificial Sequence
  source: /note="Description of Artificial Sequence: Synthetic oligonucleotide"
cagaucaaacacaauuucagu

SEQ ID NO: 579 - RNA, 21 nt, Artificial Sequence
  source: /note="Description of Artificial Sequence: Synthetic oligonucleotide"
cagaucaaacacaauuucagu

SEQ ID NO: 580 - RNA, 23 nt, Artificial Sequence
  source: /note="Description of Artificial Sequence: Synthetic oligonucleotide"
aaagguacuuguuguuuaaaucu

SEQ ID NO: 581 - RNA, 23 nt, Artificial Sequence
  source: /note="Description of Artificial Sequence: Synthetic oligonucleotide"
aaagguacuuguuguuuaaaucu

SEQ ID NO: 582 - RNA, 23 nt, Artificial Sequence
  source: /note="Description of Artificial Sequence: Synthetic oligonucleotide"
aaagguacuuguuguuuaaaucu

SEQ ID NO: 583 - RNA, 23 nt, Artificial Sequence
  source: /note="Description of Artificial Sequence: Synthetic oligonucleotide"
uuauagugaguuauuuugucaau

SEQ ID NO: 584 - RNA, 23 nt, Artificial Sequence
  source: /note="Description of Artificial Sequence: Synthetic oligonucleotide"
uuauagugaguuauuuugucaau

SEQ ID NO: 585 - RNA, 23 nt, Artificial Sequence
  source: /note="Description of Artificial Sequence: Synthetic oligonucleotide"
uuauagugaguuauuuugucaau

SEQ ID NO: 586 - RNA, 23 nt, Artificial Sequence
  source: /note="Description of Artificial Sequence: Synthetic oligonucleotide"
auuauagugaguuauuuugucaa

SEQ ID NO: 587 - RNA, 23 nt, Artificial Sequence
  source: /note="Description of Artificial Sequence: Synthetic oligonucleotide"
auuauagugaguuauuuugucaa

SEQ ID NO: 588 - RNA, 23 nt, Artificial Sequence
  source: /note="Description of Artificial Sequence: Synthetic oligonucleotide"
auuauagugaguuauuuugucaa

SEQ ID NO: 589 - RNA, 23 nt, Artificial Sequence
  source: /note="Description of Artificial Sequence: Synthetic oligonucleotide"
aaaaguucaaauauccggaaccg

SEQ ID NO: 590 - RNA, 23 nt, Artificial Sequence
  source: /note="Description of Artificial Sequence: Synthetic oligonucleotide"
aaaaguucaaauauccggaaccg

SEQ ID NO: 591 - RNA, 23 nt, Artificial Sequence
  source: /note="Description of Artificial Sequence: Synthetic oligonucleotide"
aaaaguucaaauauccggaaccg

SEQ ID NO: 592 - RNA, 23 nt, Artificial Sequence
  source: /note="Description of Artificial Sequence: Synthetic oligonucleotide"
ugaaauuguguuugaucugcaga

SEQ ID NO: 593 - RNA, 23 nt, Artificial Sequence
  source: /note="Description of Artificial Sequence: Synthetic oligonucleotide"
ugaaauuguguuugaucugcaga

SEQ ID NO: 594 - RNA, 23 nt, Artificial Sequence
  source: /note="Description of Artificial Sequence: Synthetic oligonucleotide"
ugaaauuguguuugaucugcaga

SEQ ID NO: 595 - RNA, 23 nt, Artificial Sequence
  source: /note="Description of Artificial Sequence: Synthetic oligonucleotide"
uauuauaaaaauaucuugcuuuu

SEQ ID NO: 596 - RNA, 23 nt, Artificial Sequence
  source: /note="Description of Artificial Sequence: Synthetic oligonucleotide"
uauuauaaaaauaucuugcuuuu

SEQ ID NO: 597 - RNA, 23 nt, Artificial Sequence
  source: /note="Description of Artificial Sequence: Synthetic oligonucleotide"
uauuauaaaaauaucuugcuuuu

SEQ ID NO: 598 - RNA, 23 nt, Artificial Sequence
  source: /note="Description of Artificial Sequence: Synthetic oligonucleotide"
acugaaauuguguuugaucugca

SEQ ID NO: 599 - RNA, 23 nt, Artificial Sequence
  source: /note="Description of Artificial Sequence: Synthetic oligonucleotide"
acugaaauuguguuugaucugca

SEQ ID NO: 600 - RNA, 23 nt, Artificial Sequence
  source: /note="Description of Artificial Sequence: Synthetic oligonucleotide"
acugaaauuguguuugaucugca

SEQ ID NO: 601 - RNA, 19 nt, Artificial Sequence
  source: /note="Description of Artificial Sequence: Synthetic oligonucleotide"
uauccgugguuuccugcua

SEQ ID NO: 602 - RNA, 19 nt, Artificial Sequence
  source: /note="Description of Artificial Sequence: Synthetic oligonucleotide"
gguuuccugcuaccuccaa

SEQ ID NO: 603 - RNA, 19 nt, Artificial Sequence
  source: /note="Description of Artificial Sequence: Synthetic oligonucleotide"
ccuccaaccaugggccuuu

SEQ ID NO: 604 - RNA, 19 nt, Artificial Sequence
  source: /note="Description of Artificial Sequence: Synthetic oligonucleotide"
gggccuuuugggaauacuu

SEQ ID NO: 605 - RNA, 19 nt, Artificial Sequence
  source: /note="Description of Artificial Sequence: Synthetic oligonucleotide"
ggaauacuuuguuuuuuaa

SEQ ID NO: 606 - RNA, 19 nt, Artificial Sequence
  source: /note="Description of Artificial Sequence: Synthetic oligonucleotide"
cuuuguuuuuuaaucuucc

SEQ ID NO: 607 - RNA, 19 nt, Artificial Sequence
  source: /note="Description of Artificial Sequence: Synthetic oligonucleotide"
cuuccuggggaaaaccugg

SEQ ID NO: 608 - RNA, 19 nt, Artificial Sequence
  source: /note="Description of Artificial Sequence: Synthetic oligonucleotide"
ggaaaaccuggggacagga

SEQ ID NO: 609 - RNA, 19 nt, Artificial Sequence
  source: /note="Description of Artificial Sequence: Synthetic oligonucleotide"
gggacaggagcaaacauau

SEQ ID NO: 610 - RNA, 19 nt, Artificial Sequence
  source: /note="Description of Artificial Sequence: Synthetic oligonucleotide"
caaacauaugucauuucag

SEQ ID NO: 611 - RNA, 19 nt, Artificial Sequence
  source: /note="Description of Artificial Sequence: Synthetic oligonucleotide"
cauuucagcaccaaaaaua

SEQ ID NO: 612 - RNA, 19 nt, Artificial Sequence
  source: /note="Description of Artificial Sequence: Synthetic oligonucleotide"
gcaccaaaaauauuccgug

SEQ ID NO: 613 - RNA, 19 nt, Artificial Sequence
  source: /note="Description of Artificial Sequence: Synthetic oligonucleotide"
ccguguuggagcaucugaa

SEQ ID NO: 614 - RNA, 19 nt, Artificial Sequence
  source: /note="Description of Artificial Sequence: Synthetic oligonucleotide"
ggagcaucugaaaauauug

SEQ ID NO: 615 - RNA, 19 nt, Artificial Sequence
  source: /note="Description of Artificial Sequence: Synthetic oligonucleotide"
gaaaauauugugauucaag

SEQ ID NO: 616 - RNA, 19 nt, Artificial Sequence
  source: /note="Description of Artificial Sequence: Synthetic oligonucleotide"
gauucaaguuuauggauac

SEQ ID NO: 617 - RNA, 19 nt, Artificial Sequence
  source: /note="Description of Artificial Sequence: Synthetic oligonucleotide"
ggauacacugaagcauuug

SEQ ID NO: 618 - RNA, 19 nt, Artificial Sequence
  source: /note="Description of Artificial Sequence: Synthetic oligonucleotide"
gaagcauuugaugcaacaa

SEQ ID NO: 619 - RNA, 19 nt, Artificial Sequence
  source: /note="Description of Artificial Sequence: Synthetic oligonucleotide"
ugcaacaaucucuauuaaa

SEQ ID NO: 620 - RNA, 19 nt, Artificial Sequence
  source: /note="Description of Artificial Sequence: Synthetic oligonucleotide"
aaucucuauuaaaaguuau

SEQ ID NO: 621 - RNA, 19 nt, Artificial Sequence
  source: /note="Description of Artificial Sequence: Synthetic oligonucleotide"
aaguuauccugauaaaaaa

SEQ ID NO: 622 - RNA, 19 nt, Artificial Sequence
  source: /note="Description of Artificial Sequence: Synthetic oligonucleotide"
cugauaaaaaauuuaguua

SEQ ID NO: 623 - RNA, 19 nt, Artificial Sequence
  source: /note="Description of Artificial Sequence: Synthetic oligonucleotide"
uuaguuacuccucaggcca

SEQ ID NO: 624 - RNA, 19 nt, Artificial Sequence
  source: /note="Description of Artificial Sequence: Synthetic oligonucleotide"
ccucaggccauguucauuu

SEQ ID NO: 625 - RNA, 19 nt, Artificial Sequence
  source: /note="Description of Artificial Sequence: Synthetic oligonucleotide"
uucauuuauccucagagaa

SEQ ID NO: 626 - RNA, 19 nt, Artificial Sequence
  source: /note="Description of Artificial Sequence: Synthetic oligonucleotide"
cucagagaauaaauuccaa

SEQ ID NO: 627 - RNA, 19 nt, Artificial Sequence
  source: /note="Description of Artificial Sequence: Synthetic oligonucleotide"
aauaaauuccaaaacucug

SEQ ID NO: 628 - RNA, 19 nt, Artificial Sequence
  source: /note="Description of Artificial Sequence: Synthetic oligonucleotide"
cucugcaaucuuaacaaua

SEQ ID NO: 629 - RNA, 19 nt, Artificial Sequence
  source: /note="Description of Artificial Sequence: Synthetic oligonucleotide"
cuuaacaauacaaccaaaa

SEQ ID NO: 630 - RNA, 19 nt, Artificial Sequence
  source: /note="Description of Artificial Sequence: Synthetic oligonucleotide"
caaccaaaacaauugccug

SEQ ID NO: 631 - RNA, 19 nt, Artificial Sequence
  source: /note="Description of Artificial Sequence: Synthetic oligonucleotide"
caauugccuggaggacaaa

SEQ ID NO: 632 - RNA, 19 nt, Artificial Sequence
  source: /note="Description of Artificial Sequence: Synthetic oligonucleotide"
ggacaaaacccaguuucuu

SEQ ID NO: 633 - RNA, 19 nt, Artificial Sequence
  source: /note="Description of Artificial Sequence: Synthetic oligonucleotide"
ccaguuucuuauguguauu

SEQ ID NO: 634 - RNA, 19 nt, Artificial Sequence
  source: /note="Description of Artificial Sequence: Synthetic oligonucleotide"
auguguauuuggaaguugu

SEQ ID NO: 635 - RNA, 19 nt, Artificial Sequence
  source: /note="Description of Artificial Sequence: Synthetic oligonucleotide"
ggaaguuguaucaaagcau

SEQ ID NO: 636 - RNA, 19 nt, Artificial Sequence
  source: /note="Description of Artificial Sequence: Synthetic oligonucleotide"
guaucaaagcauuuuucaa

SEQ ID NO: 637 - RNA, 19 nt, Artificial Sequence
  source: /note="Description of Artificial Sequence: Synthetic oligonucleotide"
uuuucaaaaucaaaaagaa

SEQ ID NO: 638 - RNA, 19 nt, Artificial Sequence
  source: /note="Description of Artificial Sequence: Synthetic oligonucleotide"
caaaaagaaugccaauaac

SEQ ID NO: 639 - RNA, 19 nt, Artificial Sequence
  source: /note="Description of Artificial Sequence: Synthetic oligonucleotide"
gccaauaaccuaugacaau

SEQ ID NO: 640 - RNA, 19 nt, Artificial Sequence
  source: /note="Description of Artificial Sequence: Synthetic oligonucleotide"
ccuaugacaauggauuucu

SEQ ID NO: 641 - RNA, 19 nt, Artificial Sequence
  source: /note="Description of Artificial Sequence: Synthetic oligonucleotide"
uggauuucucuucauucau

SEQ ID NO: 642 - RNA, 19 nt, Artificial Sequence
  source: /note="Description of Artificial Sequence: Synthetic oligonucleotide"
cauucauacagacaaaccu

SEQ ID NO: 643 - RNA, 19 nt, Artificial Sequence
  source: /note="Description of Artificial Sequence: Synthetic oligonucleotide"
cagacaaaccuguuuauac

SEQ ID NO: 644 - RNA, 19 nt, Artificial Sequence
  source: /note="Description of Artificial Sequence: Synthetic oligonucleotide"
guuuauacuccagaccagu

SEQ ID NO: 645 - RNA, 19 nt, Artificial Sequence
  source: /note="Description of Artificial Sequence: Synthetic oligonucleotide"
agaccagucaguaaaaguu

SEQ ID NO: 646 - RNA, 19 nt, Artificial Sequence
  source: /note="Description of Artificial Sequence: Synthetic oligonucleotide"
aguaaaaguuagaguuuau

SEQ ID NO: 647 - RNA, 19 nt, Artificial Sequence
  source: /note="Description of Artificial Sequence: Synthetic oligonucleotide"
agaguuuauucguugaaug

SEQ ID NO: 648 - RNA, 19 nt, Artificial Sequence
  source: /note="Description of Artificial Sequence: Synthetic oligonucleotide"
cguugaaugacgacuugaa

SEQ ID NO: 649 - RNA, 19 nt, Artificial Sequence
  source: /note="Description of Artificial Sequence: Synthetic oligonucleotide"
cuugaagccagccaaaaga

SEQ ID NO: 650 - RNA, 19 nt, Artificial Sequence
  source: /note="Description of Artificial Sequence: Synthetic oligonucleotide"
ccagccaaaagagaaacug

SEQ ID NO: 651 - RNA, 19 nt, Artificial Sequence
  source: /note="Description of Artificial Sequence: Synthetic oligonucleotide"
aaacugucuuaacuuucau

SEQ ID NO: 652 - RNA, 19 nt, Artificial Sequence
  source: /note="Description of Artificial Sequence: Synthetic oligonucleotide"
aacuuucauagauccugaa

SEQ ID NO: 653 - RNA, 19 nt, Artificial Sequence
  source: /note="Description of Artificial Sequence: Synthetic oligonucleotide"
cauagauccugaaggauca

SEQ ID NO: 654 - RNA, 19 nt, Artificial Sequence
  source: /note="Description of Artificial Sequence: Synthetic oligonucleotide"
gaaggaucagaaguugaca

SEQ ID NO: 655 - RNA, 19 nt, Artificial Sequence
  source: /note="Description of Artificial Sequence: Synthetic oligonucleotide"
ugacaugguagaagaaauu

SEQ ID NO: 656 - RNA, 19 nt, Artificial Sequence
  source: /note="Description of Artificial Sequence: Synthetic oligonucleotide"
gaagaaauugaucauauug

SEQ ID NO: 657 - RNA, 19 nt, Artificial Sequence
  source: /note="Description of Artificial Sequence: Synthetic oligonucleotide"
gaucauauuggaauuaucu

SEQ ID NO: 658 - RNA, 19 nt, Artificial Sequence
  source: /note="Description of Artificial Sequence: Synthetic oligonucleotide"
ggaauuaucucuuuuccug

SEQ ID NO: 659 - RNA, 19 nt, Artificial Sequence
  source: /note="Description of Artificial Sequence: Synthetic oligonucleotide"
cucuuuuccugacuucaag

SEQ ID NO: 660 - RNA, 19 nt, Artificial Sequence
  source: /note="Description of Artificial Sequence: Synthetic oligonucleotide"
acuucaagauuccgucuaa

SEQ ID NO: 661 - RNA, 19 nt, Artificial Sequence
  source: /note="Description of Artificial Sequence: Synthetic oligonucleotide"
ccgucuaauccuagauaug

SEQ ID NO: 662 - RNA, 19 nt, Artificial Sequence
  source: /note="Description of Artificial Sequence: Synthetic oligonucleotide"
ccuagauaugguaugugga

SEQ ID NO: 663 - RNA, 19 nt, Artificial Sequence
  source: /note="Description of Artificial Sequence: Synthetic oligonucleotide"
uguggacgaucaaggcuaa

SEQ ID NO: 664 - RNA, 19 nt, Artificial Sequence
  source: /note="Description of Artificial Sequence: Synthetic oligonucleotide"
cgaucaaggcuaaauauaa

SEQ ID NO: 665 - RNA, 19 nt, Artificial Sequence
  source: /note="Description of Artificial Sequence: Synthetic oligonucleotide"
auauaaagaggacuuuuca

SEQ ID NO: 666 - RNA, 19 nt, Artificial Sequence
  source: /note="Description of Artificial Sequence: Synthetic oligonucleotide"
gaggacuuuucaacaacug

SEQ ID NO: 667 - RNA, 19 nt, Artificial Sequence
  source: /note="Description of Artificial Sequence: Synthetic oligonucleotide"
caacuggaaccgcauauuu

SEQ ID NO: 668 - RNA, 19 nt, Artificial Sequence
  source: /note="Description of Artificial Sequence: Synthetic oligonucleotide"
cgcauauuuugaaguuaaa

SEQ ID NO: 669 - RNA, 19 nt, Artificial Sequence
  source: /note="Description of Artificial Sequence: Synthetic oligonucleotide"
aaguuaaagaauaugucuu

SEQ ID NO: 670 - RNA, 19 nt, Artificial Sequence
  source: /note="Description of Artificial Sequence: Synthetic oligonucleotide"
gaauaugucuugccacauu

SEQ ID NO: 671 - RNA, 19 nt, Artificial Sequence
  source: /note="Description of Artificial Sequence: Synthetic oligonucleotide"
ccacauuuuucugucucaa

SEQ ID NO: 672 - RNA, 19 nt, Artificial Sequence
  source: /note="Description of Artificial Sequence: Synthetic oligonucleotide"
cugucucaaucgagccaga

SEQ ID NO: 673 - RNA, 19 nt, Artificial Sequence
  source: /note="Description of Artificial Sequence: Synthetic oligonucleotide"
caaucgagccagaauauaa

SEQ ID NO: 674 - RNA, 19 nt, Artificial Sequence
  source: /note="Description of Artificial Sequence: Synthetic oligonucleotide"
gaauauaauuucauugguu

SEQ ID NO: 675 - RNA, 19 nt, Artificial Sequence
  source: /note="Description of Artificial Sequence: Synthetic oligonucleotide"
auugguuacaagaacuuua

SEQ ID NO: 676 - RNA, 19 nt, Artificial Sequence
  source: /note="Description of Artificial Sequence: Synthetic oligonucleotide"
agaacuuuaagaauuuuga

SEQ ID NO: 677 - RNA, 19 nt, Artificial Sequence
  source: /note="Description of Artificial Sequence: Synthetic oligonucleotide"
gaauuuugaaauuacuaua

SEQ ID NO: 678 - RNA, 19 nt, Artificial Sequence
  source: /note="Description of Artificial Sequence: Synthetic oligonucleotide"
gaaauuacuauaaaagcaa

SEQ ID NO: 679 - RNA, 19 nt, Artificial Sequence
  source: /note="Description of Artificial Sequence: Synthetic oligonucleotide"
aaagcaagauauuuuuaua

SEQ ID NO: 680 - RNA, 19 nt, Artificial Sequence
  source: /note="Description of Artificial Sequence: Synthetic oligonucleotide"
auauuuuuauaauaaagua

SEQ ID NO: 681 - RNA, 19 nt, Artificial Sequence
  source: /note="Description of Artificial Sequence: Synthetic oligonucleotide"
aaguagucacugaggcuga

SEQ ID NO: 682 - RNA, 19 nt, Artificial Sequence
  source: /note="Description of Artificial Sequence: Synthetic oligonucleotide"
cacugaggcugacguuuau

SEQ ID NO: 683 - RNA, 19 nt, Artificial Sequence
  source: /note="Description of Artificial Sequence: Synthetic oligonucleotide"
cguuuauaucacauuugga

SEQ ID NO: 684 - RNA, 19 nt, Artificial Sequence
  source: /note="Description of Artificial Sequence: Synthetic oligonucleotide"
cacauuuggaauaagagaa

SEQ ID NO: 685 - RNA, 19 nt, Artificial Sequence
  source: /note="Description of Artificial Sequence: Synthetic oligonucleotide"
aauaagagaagacuuaaaa

SEQ ID NO: 686 - RNA, 19 nt, Artificial Sequence
  source: /note="Description of Artificial Sequence: Synthetic oligonucleotide"
cuuaaaagaugaucaaaaa

SEQ ID NO: 687 - RNA, 19 nt, Artificial Sequence
  source: /note="Description of Artificial Sequence: Synthetic oligonucleotide"
gaugaucaaaaagaaauga

SEQ ID NO: 688 - RNA, 19 nt, Artificial Sequence
  source: /note="Description of Artificial Sequence: Synthetic oligonucleotide"
aaaugaugcaaacagcaau

SEQ ID NO: 689 - RNA, 19 nt, Artificial Sequence
  source: /note="Description of Artificial Sequence: Synthetic oligonucleotide"
acagcaaugcaaaacacaa

SEQ ID NO: 690 - RNA, 19 nt, Artificial Sequence
  source: /note="Description of Artificial Sequence: Synthetic oligonucleotide"
aaaacacaauguugauaaa

SEQ ID NO: 691 - RNA, 19 nt, Artificial Sequence
  source: /note="Description of Artificial Sequence: Synthetic oligonucleotide"
caauguugauaaauggaau

SEQ ID NO: 692 - RNA, 19 nt, Artificial Sequence
  source: /note="Description of Artificial Sequence: Synthetic oligonucleotide"
ggaauugcucaagucacau

SEQ ID NO: 693 - RNA, 19 nt, Artificial Sequence
  source: /note="Description of Artificial Sequence: Synthetic oligonucleotide"
gcucaagucacauuugauu

SEQ ID NO: 694 - RNA, 19 nt, Artificial Sequence
  source: /note="Description of Artificial Sequence: Synthetic oligonucleotide"
auuugauucugaaacagca

SEQ ID NO: 695 - RNA, 19 nt, Artificial Sequence
  source: /note="Description of Artificial Sequence: Synthetic oligonucleotide"
ugaaacagcagucaaagaa

SEQ ID NO: 696 - RNA, 19 nt, Artificial Sequence
  source: /note="Description of Artificial Sequence: Synthetic oligonucleotide"
caaagaacugucauacuac

SEQ ID NO: 697 - RNA, 19 nt, Artificial Sequence
  source: /note="Description of Artificial Sequence: Synthetic oligonucleotide"
cauacuacaguuuagaaga

SEQ ID NO: 698 - RNA, 19 nt, Artificial Sequence
  source: /note="Description of Artificial Sequence: Synthetic oligonucleotide"
caguuuagaagauuuaaac

SEQ ID NO: 699 - RNA, 19 nt, Artificial Sequence
  source: /note="Description of Artificial Sequence: Synthetic oligonucleotide"
uaaacaacaaguaccuuua

SEQ ID NO: 700 - RNA, 19 nt, Artificial Sequence
  source: /note="Description of Artificial Sequence: Synthetic oligonucleotide"
caaguaccuuuauauugcu

SEQ ID NO: 701 - RNA, 19 nt, Artificial Sequence
  source: /note="Description of Artificial Sequence: Synthetic oligonucleotide"
uauugcuguaacagucaua

SEQ ID NO: 702 - RNA, 19 nt, Artificial Sequence
  source: /note="Description of Artificial Sequence: Synthetic oligonucleotide"
aacagucauagagucuaca

SEQ ID NO: 703 - RNA, 19 nt, Artificial Sequence
  source: /note="Description of Artificial Sequence: Synthetic oligonucleotide"
agagucuacagguggauuu

SEQ ID NO: 704 - RNA, 19 nt, Artificial Sequence
  source: /note="Description of Artificial Sequence: Synthetic oligonucleotide"
ggauuuucugaagaggcag

SEQ ID NO: 705 - RNA, 19 nt, Artificial Sequence
  source: /note="Description of Artificial Sequence: Synthetic oligonucleotide"
gaagaggcagaaauaccug

SEQ ID NO: 706 - RNA, 19 nt, Artificial Sequence
  source: /note="Description of Artificial Sequence: Synthetic oligonucleotide"
agaaauaccuggcaucaaa

SEQ ID NO: 707 - RNA, 19 nt, Artificial Sequence
  source: /note="Description of Artificial Sequence: Synthetic oligonucleotide"
gcaucaaauauguccucuc

SEQ ID NO: 708 - RNA, 19 nt, Artificial Sequence
  source: /note="Description of Artificial Sequence: Synthetic oligonucleotide"
uguccucucucccuacaaa

SEQ ID NO: 709 - RNA, 19 nt, Artificial Sequence
  source: /note="Description of Artificial Sequence: Synthetic oligonucleotide"
gaauuugguugcuacuccu

SEQ ID NO: 710 - RNA, 19 nt, Artificial Sequence
  source: /note="Description of Artificial Sequence: Synthetic oligonucleotide"
gcuacuccucuuuuccuga

SEQ ID NO: 711 - RNA, 19 nt, Artificial Sequence
  source: /note="Description of Artificial Sequence: Synthetic oligonucleotide"
cucuuuuccugaagccugg

SEQ ID NO: 712 - RNA, 19 nt, Artificial Sequence
  source: /note="Description of Artificial Sequence: Synthetic oligonucleotide"
ccugggauuccauauccca

SEQ ID NO: 713 - RNA, 19 nt, Artificial Sequence
  source: /note="Description of Artificial Sequence: Synthetic oligonucleotide"
cauaucccaucaaggugca

SEQ ID NO: 714 - RNA, 19 nt, Artificial Sequence
  source: /note="Description of Artificial Sequence: Synthetic oligonucleotide"
ccaucaaggugcagguuaa

SEQ ID NO: 715 - RNA, 19 nt, Artificial Sequence
  source: /note="Description of Artificial Sequence: Synthetic oligonucleotide"
cagguuaaagauucgcuug

SEQ ID NO: 716 - RNA, 19 nt, Artificial Sequence
  source: /note="Description of Artificial Sequence: Synthetic oligonucleotide"
uucgcuugaccaguuggua

SEQ ID NO: 717 - RNA, 19 nt, Artificial Sequence
  source: /note="Description of Artificial Sequence: Synthetic oligonucleotide"
ccaguugguaggaggaguc

SEQ ID NO: 718 - RNA, 19 nt, Artificial Sequence
  source: /note="Description of Artificial Sequence: Synthetic oligonucleotide"
ggaggagucccaguaacac

SEQ ID NO: 719 - RNA, 19 nt, Artificial Sequence
  source: /note="Description of Artificial Sequence: Synthetic oligonucleotide"
caguaacacugaaugcaca

SEQ ID NO: 720 - RNA, 19 nt, Artificial Sequence
  source: /note="Description of Artificial Sequence: Synthetic oligonucleotide"
gaaugcacaaacaauugau

SEQ ID NO: 721 - RNA, 19 nt, Artificial Sequence
  source: /note="Description of Artificial Sequence: Synthetic oligonucleotide"
aacaauugauguaaaccaa

SEQ ID NO: 722 - RNA, 19 nt, Artificial Sequence
  source: /note="Description of Artificial Sequence: Synthetic oligonucleotide"
uaaaccaagagacaucuga

SEQ ID NO: 723 - RNA, 19 nt, Artificial Sequence
  source: /note="Description of Artificial Sequence: Synthetic oligonucleotide"
caucugacuuggauccaag

SEQ ID NO: 724 - RNA, 19 nt, Artificial Sequence
  source: /note="Description of Artificial Sequence: Synthetic oligonucleotide"
gauccaagcaaaaguguaa

SEQ ID NO: 725 - RNA, 19 nt, Artificial Sequence
  source: /note="Description of Artificial Sequence: Synthetic oligonucleotide"
caaaaguguaacacguguu

SEQ ID NO: 726 - RNA, 19 nt, Artificial Sequence
  source: /note="Description of Artificial Sequence: Synthetic oligonucleotide"
aacacguguugaugaugga

SEQ ID NO: 727 - RNA, 19 nt, Artificial Sequence
  source: /note="Description of Artificial Sequence: Synthetic oligonucleotide"
ugauggaguagcuuccuuu

SEQ ID NO: 728 - RNA, 19 nt, Artificial Sequence
  source: /note="Description of Artificial Sequence: Synthetic oligonucleotide"
guagcuuccuuugugcuua

SEQ ID NO: 729 - RNA, 19 nt, Artificial Sequence
  source: /note="Description of Artificial Sequence: Synthetic oligonucleotide"
gcuuaaucucccaucugga

SEQ ID NO: 730 - RNA, 19 nt, Artificial Sequence
  source: /note="Description of Artificial Sequence: Synthetic oligonucleotide"
ccaucuggagugacggugc

SEQ ID NO: 731 - RNA, 19 nt, Artificial Sequence
  source: /note="Description of Artificial Sequence: Synthetic oligonucleotide"
ugacggugcuggaguuuaa

SEQ ID NO: 732 - RNA, 19 nt, Artificial Sequence
  source: /note="Description of Artificial Sequence: Synthetic oligonucleotide"
gcuggaguuuaaugucaaa

SEQ ID NO: 733 - RNA, 19 nt, Artificial Sequence
  source: /note="Description of Artificial Sequence: Synthetic oligonucleotide"
ugucaaaacugaugcucca

SEQ ID NO: 734 - RNA, 19 nt, Artificial Sequence
  source: /note="Description of Artificial Sequence: Synthetic oligonucleotide"
gaugcuccagaucuuccag

SEQ ID NO: 735 - RNA, 19 nt, Artificial Sequence
  source: /note="Description of Artificial Sequence: Synthetic oligonucleotide"
cagaucuuccagaagaaaa

SEQ ID NO: 736 - RNA, 19 nt, Artificial Sequence
  source: /note="Description of Artificial Sequence: Synthetic oligonucleotide"
agaaaaucaggccagggaa

SEQ ID NO: 737 - RNA, 19 nt, Artificial Sequence
  source: /note="Description of Artificial Sequence: Synthetic oligonucleotide"
ggccagggaagguuaccga

SEQ ID NO: 738 - RNA, 19 nt, Artificial Sequence
  source: /note="Description of Artificial Sequence: Synthetic oligonucleotide"
guuaccgagcaauagcaua

SEQ ID NO: 739 - RNA, 19 nt, Artificial Sequence
  source: /note="Description of Artificial Sequence: Synthetic oligonucleotide"
auagcauacucaucucuca

SEQ ID NO: 740 - RNA, 19 nt, Artificial Sequence
  source: /note="Description of Artificial Sequence: Synthetic oligonucleotide"
uacucaucucucagccaaa

SEQ ID NO: 741 - RNA, 19 nt, Artificial Sequence
  source: /note="Description of Artificial Sequence: Synthetic oligonucleotide"
gccaaaguuaccuuuauau

SEQ ID NO: 742 - RNA, 19 nt, Artificial Sequence
  source: /note="Description of Artificial Sequence: Synthetic oligonucleotide"
ccuuuauauugauuggacu

SEQ ID NO: 743 - RNA, 19 nt, Artificial Sequence
  source: /note="Description of Artificial Sequence: Synthetic oligonucleotide"
gauuggacugauaaccaua

SEQ ID NO: 744 - RNA, 19 nt, Artificial Sequence
  source: /note="Description of Artificial Sequence: Synthetic oligonucleotide"
cugauaaccauaaggcuuu

SEQ ID NO: 745 - RNA, 19 nt, Artificial Sequence
  source: /note="Description of Artificial Sequence: Synthetic oligonucleotide"
aggcuuugcuagugggaga

SEQ ID NO: 746 - RNA, 19 nt, Artificial Sequence
  source: /note="Description of Artificial Sequence: Synthetic oligonucleotide"
gugggagaacaucugaaua

SEQ ID NO: 747 - RNA, 19 nt, Artificial Sequence
  source: /note="Description of Artificial Sequence: Synthetic oligonucleotide"
caucugaauauuauuguua

SEQ ID NO: 748 - RNA, 19 nt, Artificial Sequence
  source: /note="Description of Artificial Sequence: Synthetic oligonucleotide"
uauuauuguuacccccaaa

SEQ ID NO: 749 - RNA, 19 nt, Artificial Sequence
  source: /note="Description of Artificial Sequence: Synthetic oligonucleotide"
cccaaaagcccauauauug

SEQ ID NO: 750 - RNA, 19 nt, Artificial Sequence
  source: /note="Description of Artificial Sequence: Synthetic oligonucleotide"
ccaaaagcccauauauuga

SEQ ID NO: 751 - RNA, 19 nt, Artificial Sequence
  source: /note="Description of Artificial Sequence: Synthetic oligonucleotide"
caaaagcccauauauugac

SEQ ID NO: 752 - RNA, 19 nt, Artificial Sequence
  source: /note="Description of Artificial Sequence: Synthetic oligonucleotide"
aaaagcccauauauugaca

SEQ ID NO: 753 - RNA, 19 nt, Artificial Sequence
  source: /note="Description of Artificial Sequence: Synthetic oligonucleotide"
aaagcccauauauugacaa

SEQ ID NO: 754 - RNA, 19 nt, Artificial Sequence
  source: /note="Description of Artificial Sequence: Synthetic oligonucleotide"
aagcccauauauugacaaa

SEQ ID NO: 755 - RNA, 19 nt, Artificial Sequence
  source: /note="Description of Artificial Sequence: Synthetic oligonucleotide"
agcccauauauugacaaaa

SEQ ID NO: 756 - RNA, 19 nt, Artificial Sequence
  source: /note="Description of Artificial Sequence: Synthetic oligonucleotide"
gcccauauauugacaaaau

SEQ ID NO: 757 - RNA, 19 nt, Artificial Sequence
  source: /note="Description of Artificial Sequence: Synthetic oligonucleotide"
cccauauauugacaaaaua

SEQ ID NO: 758 - RNA, 19 nt, Artificial Sequence
  source: /note="Description of Artificial Sequence: Synthetic oligonucleotide"
ccauauauugacaaaauaa

SEQ ID NO: 759 - RNA, 19 nt, Artificial Sequence
  source: /note="Description of Artificial Sequence: Synthetic oligonucleotide"
cauauauugacaaaauaac

SEQ ID NO: 760 - RNA, 19 nt, Artificial Sequence
  source: /note="Description of Artificial Sequence: Synthetic oligonucleotide"
auauauugacaaaauaacu

SEQ ID NO: 761 - RNA, 19 nt, Artificial Sequence
  source: /note="Description of Artificial Sequence: Synthetic oligonucleotide"
uauauugacaaaauaacuc

SEQ ID NO: 762 - RNA, 19 nt, Artificial Sequence
  source: /note="Description of Artificial Sequence: Synthetic oligonucleotide"
auauugacaaaauaacuca

SEQ ID NO: 763 - RNA, 19 nt, Artificial Sequence
  source: /note="Description of Artificial Sequence: Synthetic oligonucleotide"
uauugacaaaauaacucac

SEQ ID NO: 764 - RNA, 19 nt, Artificial Sequence
  source: /note="Description of Artificial Sequence: Synthetic oligonucleotide"
auugacaaaauaacucacu

SEQ ID NO: 765 - RNA, 19 nt, Artificial Sequence
  source: /note="Description of Artificial Sequence: Synthetic oligonucleotide"
uugacaaaauaacucacua

SEQ ID NO: 766 - RNA, 19 nt, Artificial Sequence
  source: /note="Description of Artificial Sequence: Synthetic oligonucleotide"
ugacaaaauaacucacuau

SEQ ID NO: 767 - RNA, 19 nt, Artificial Sequence
  source: /note="Description of Artificial Sequence: Synthetic oligonucleotide"
gacaaaauaacucacuaua

SEQ ID NO: 768 - RNA, 19 nt, Artificial Sequence
  source: /note="Description of Artificial Sequence: Synthetic oligonucleotide"
aaaauaacucacuauaauu

SEQ ID NO: 769 - RNA, 19 nt, Artificial Sequence
  source: /note="Description of Artificial Sequence: Synthetic oligonucleotide"
aaauaacucacuauaauua

SEQ ID NO: 770 - RNA, 19 nt, Artificial Sequence
  source: /note="Description of Artificial Sequence: Synthetic oligonucleotide"
aauaacucacuauaauuac

SEQ ID NO: 771 - RNA, 19 nt, Artificial Sequence
  source: /note="Description of Artificial Sequence: Synthetic oligonucleotide"
auaacucacuauaauuacu

SEQ ID NO: 772 - RNA, 19 nt, Artificial Sequence
  source: /note="Description of Artificial Sequence: Synthetic oligonucleotide"
aacucacuauaauuacuug

SEQ ID NO: 773 - RNA, 19 nt, Artificial Sequence
  source: /note="Description of Artificial Sequence: Synthetic oligonucleotide"
acucacuauaauuacuuga

SEQ ID NO: 774 - RNA, 19 nt, Artificial Sequence
  source: /note="Description of Artificial Sequence: Synthetic oligonucleotide"
cucacuauaauuacuugau

SEQ ID NO: 775 - RNA, 19 nt, Artificial Sequence
  source: /note="Description of Artificial Sequence: Synthetic oligonucleotide"
ucacuauaauuacuugauu

SEQ ID NO: 776 - RNA, 19 nt, Artificial Sequence
  source: /note="Description of Artificial Sequence: Synthetic oligonucleotide"
acuauaauuacuugauuuu

SEQ ID NO: 777 - RNA, 19 nt, Artificial Sequence
  source: /note="Description of Artificial Sequence: Synthetic oligonucleotide"
cuauaauuacuugauuuua

SEQ ID NO: 778 - RNA, 19 nt, Artificial Sequence
  source: /note="Description of Artificial Sequence: Synthetic oligonucleotide"
uauaauuacuugauuuuau

SEQ ID NO: 779 - RNA, 19 nt, Artificial Sequence
  source: /note="Description of Artificial Sequence: Synthetic oligonucleotide"
auaauuacuugauuuuauc

SEQ ID NO: 780 - RNA, 19 nt, Artificial Sequence
  source: /note="Description of Artificial Sequence: Synthetic oligonucleotide"
uaauuacuugauuuuaucc

SEQ ID NO: 781 - RNA, 19 nt, Artificial Sequence
  source: /note="Description of Artificial Sequence: Synthetic oligonucleotide"
aauuacuugauuuuaucca

SEQ ID NO: 782 - RNA, 19 nt, Artificial Sequence
  source: /note="Description of Artificial Sequence: Synthetic oligonucleotide"
auuacuugauuuuauccaa

SEQ ID NO: 783 - RNA, 19 nt, Artificial Sequence
  source: /note="Description of Artificial Sequence: Synthetic oligonucleotide"
uuauccaagggcaaaauua

SEQ ID NO: 784 - RNA, 19 nt, Artificial Sequence
  source: /note="Description of Artificial Sequence: Synthetic oligonucleotide"
gcaaaauuauccacuuugg

SEQ ID NO: 785 - RNA, 19 nt, Artificial Sequence
  source: /note="Description of Artificial Sequence: Synthetic oligonucleotide"
cacuuuggcacgagggaga

SEQ ID NO: 786 - RNA, 19 nt, Artificial Sequence
  source: /note="Description of Artificial Sequence: Synthetic oligonucleotide"
cgagggagaaauuuucaga

SEQ ID NO: 787 - RNA, 19 nt, Artificial Sequence
  source: /note="Description of Artificial Sequence: Synthetic oligonucleotide"
auuuucagaugcaucuuau

SEQ ID NO: 788 - RNA, 19 nt, Artificial Sequence
  source: /note="Description of Artificial Sequence: Synthetic oligonucleotide"
gcaucuuaucaaaguauaa

SEQ ID NO: 789 - RNA, 19 nt, Artificial Sequence
  source: /note="Description of Artificial Sequence: Synthetic oligonucleotide"
caaaguauaaacauuccag

SEQ ID NO: 790 - RNA, 19 nt, Artificial Sequence
  source: /note="Description of Artificial Sequence: Synthetic oligonucleotide"
auuccaguaacacagaaca

SEQ ID NO: 791 - RNA, 19 nt, Artificial Sequence
  source: /note="Description of Artificial Sequence: Synthetic oligonucleotide"
cacagaacaugguuccuuc

SEQ ID NO: 792 - RNA, 19 nt, Artificial Sequence
  source: /note="Description of Artificial Sequence: Synthetic oligonucleotide"
gguuccuucaucccgacuu

SEQ ID NO: 793 - RNA, 19 nt, Artificial Sequence
  source: /note="Description of Artificial Sequence: Synthetic oligonucleotide"
cccgacuucuggucuauua

SEQ ID NO: 794 - RNA, 19 nt, Artificial Sequence
  source: /note="Description of Artificial Sequence: Synthetic oligonucleotide"
ggucuauuacaucgucaca

SEQ ID NO: 795 - RNA, 19 nt, Artificial Sequence
  source: /note="Description of Artificial Sequence: Synthetic oligonucleotide"
aucgucacaggagaacaga

SEQ ID NO: 796 - RNA, 19 nt, Artificial Sequence
  source: /note="Description of Artificial Sequence: Synthetic oligonucleotide"
caggagaacagacagcaga

SEQ ID NO: 797 - RNA, 19 nt, Artificial Sequence
  source: /note="Description of Artificial Sequence: Synthetic oligonucleotide"
cagcagaauuagugucuga

SEQ ID NO: 798 - RNA, 19 nt, Artificial Sequence
  source: /note="Description of Artificial Sequence: Synthetic oligonucleotide"
gugucugauucagucuggu

SEQ ID NO: 799 - RNA, 19 nt, Artificial Sequence
  source: /note="Description of Artificial Sequence: Synthetic oligonucleotide"
cagucugguuaaauauuga

SEQ ID NO: 800 - RNA, 19 nt, Artificial Sequence
  source: /note="Description of Artificial Sequence: Synthetic oligonucleotide"
guuaaauauugaagaaaaa

SEQ ID NO: 801 - RNA, 19 nt, Artificial Sequence
  source: /note="Description of Artificial Sequence: Synthetic oligonucleotide"
agaaaaauguggcaaccag

SEQ ID NO: 802 - RNA, 19 nt, Artificial Sequence
  source: /note="Description of Artificial Sequence: Synthetic oligonucleotide"
gcaaccagcuccagguuca

SEQ ID NO: 803 - RNA, 19 nt, Artificial Sequence
  source: /note="Description of Artificial Sequence: Synthetic oligonucleotide"
gcuccagguucaucugucu

SEQ ID NO: 804 - RNA, 19 nt, Artificial Sequence
  source: /note="Description of Artificial Sequence: Synthetic oligonucleotide"
aucugucuccugaugcaga

SEQ ID NO: 805 - RNA, 19 nt, Artificial Sequence
  source: /note="Description of Artificial Sequence: Synthetic oligonucleotide"
gaugcagaugcauauucuc

SEQ ID NO: 806 - RNA, 19 nt, Artificial Sequence
  source: /note="Description of Artificial Sequence: Synthetic oligonucleotide"
gcauauucuccaggccaaa

SEQ ID NO: 807 - RNA, 19 nt, Artificial Sequence
  source: /note="Description of Artificial Sequence: Synthetic oligonucleotide"
aggccaaacugugucucuu

SEQ ID NO: 808 - RNA, 19 nt, Artificial Sequence
  source: /note="Description of Artificial Sequence: Synthetic oligonucleotide"
gugucucuuaauauggcaa

SEQ ID NO: 809 - RNA, 19 nt, Artificial Sequence
  source: /note="Description of Artificial Sequence: Synthetic oligonucleotide"
uuaauauggcaacuggaau

SEQ ID NO: 810 - RNA, 19 nt, Artificial Sequence
  source: /note="Description of Artificial Sequence: Synthetic oligonucleotide"
aacuggaauggauuccugg

SEQ ID NO: 811 - RNA, 19 nt, Artificial Sequence
  source: /note="Description of Artificial Sequence: Synthetic oligonucleotide"
uuccuggguggcauuagca

SEQ ID NO: 812 - RNA, 19 nt, Artificial Sequence
  source: /note="Description of Artificial Sequence: Synthetic oligonucleotide"
ggcauuagcagcaguggac

SEQ ID NO: 813 - RNA, 19 nt, Artificial Sequence
  source: /note="Description of Artificial Sequence: Synthetic oligonucleotide"
aguggacagugcuguguau

SEQ ID NO: 814 - RNA, 19 nt, Artificial Sequence
  source: /note="Description of Artificial Sequence: Synthetic oligonucleotide"
gcuguguauggaguccaaa

SEQ ID NO: 815 - RNA, 19 nt, Artificial Sequence
  source: /note="Description of Artificial Sequence: Synthetic oligonucleotide"
aguccaaagaggagccaaa

SEQ ID NO: 816 - RNA, 19 nt, Artificial Sequence
  source: /note="Description of Artificial Sequence: Synthetic oligonucleotide"
agaggagccaaaaagcccu

SEQ ID NO: 817 - RNA, 19 nt, Artificial Sequence
  source: /note="Description of Artificial Sequence: Synthetic oligonucleotide"
agcccuuggaaagaguauu

SEQ ID NO: 818 - RNA, 19 nt, Artificial Sequence
  source: /note="Description of Artificial Sequence: Synthetic oligonucleotide"
aagaguauuucaauucuua

SEQ ID NO: 819 - RNA, 19 nt, Artificial Sequence
  source: /note="Description of Artificial Sequence: Synthetic oligonucleotide"
uuucaauucuuagagaaga

SEQ ID NO: 820 - RNA, 19 nt, Artificial Sequence
  source: /note="Description of Artificial Sequence: Synthetic oligonucleotide"
gagaagagugaucugggcu

SEQ ID NO: 821 - RNA, 19 nt, Artificial Sequence
  source: /note="Description of Artificial Sequence: Synthetic oligonucleotide"
ugaucugggcuguggggca

SEQ ID NO: 822 - RNA, 19 nt, Artificial Sequence
  source: /note="Description of Artificial Sequence: Synthetic oligonucleotide"
ggggcaggugguggccuca

SEQ ID NO: 823 - RNA, 19 nt, Artificial Sequence
  source: /note="Description of Artificial Sequence: Synthetic oligonucleotide"
guggccucaacaaugccaa

SEQ ID NO: 824 - RNA, 19 nt, Artificial Sequence
  source: /note="Description of Artificial Sequence: Synthetic oligonucleotide"
caacaaugccaauguguuc

SEQ ID NO: 825 - RNA, 19 nt, Artificial Sequence
  source: /note="Description of Artificial Sequence: Synthetic oligonucleotide"
caauguguuccaccuagcu

SEQ ID NO: 826 - RNA, 19 nt, Artificial Sequence
  source: /note="Description of Artificial Sequence: Synthetic oligonucleotide"
caccuagcuggacuuaccu

SEQ ID NO: 827 - RNA, 19 nt, Artificial Sequence
  source: /note="Description of Artificial Sequence: Synthetic oligonucleotide"
gacuuaccuuccucacuaa

SEQ ID NO: 828 - RNA, 19 nt, Artificial Sequence
  source: /note="Description of Artificial Sequence: Synthetic oligonucleotide"
ucacuaaugcaaaugcaga

SEQ ID NO: 829 - RNA, 19 nt, Artificial Sequence
  source: /note="Description of Artificial Sequence: Synthetic oligonucleotide"
aaaugcagaugacucccaa

SEQ ID NO: 830 - RNA, 19 nt, Artificial Sequence
  source: /note="Description of Artificial Sequence: Synthetic oligonucleotide"
cucccaagaaaaugaugaa

SEQ ID NO: 831 - RNA, 19 nt, Artificial Sequence
  source: /note="Description of Artificial Sequence: Synthetic oligonucleotide"
ccuuguaaagaaauucuca

SEQ ID NO: 832 - RNA, 19 nt, Artificial Sequence
  source: /note="Description of Artificial Sequence: Synthetic oligonucleotide"
aauucucaggccaagaaga

SEQ ID NO: 833 - RNA, 19 nt, Artificial Sequence
  source: /note="Description of Artificial Sequence: Synthetic oligonucleotide"
ccaagaagaacgcugcaaa

SEQ ID NO: 834 - RNA, 19 nt, Artificial Sequence
  source: /note="Description of Artificial Sequence: Synthetic oligonucleotide"
cgcugcaaaagaagauaga

SEQ ID NO: 835 - RNA, 19 nt, Artificial Sequence
  source: /note="Description of Artificial Sequence: Synthetic oligonucleotide"
aaagaagauagaagaaaua

SEQ ID NO: 836 - RNA, 19 nt, Artificial Sequence
  source: /note="Description of Artificial Sequence: Synthetic oligonucleotide"
agaaauagcugcuaaauau

SEQ ID NO: 837 - RNA, 19 nt, Artificial Sequence
  source: /note="Description of Artificial Sequence: Synthetic oligonucleotide"
gcugcuaaauauaaacauu

SEQ ID NO: 838 - RNA, 19 nt, Artificial Sequence
  source: /note="Description of Artificial Sequence: Synthetic oligonucleotide"
acauucaguagugaagaaa

SEQ ID NO: 839 - RNA, 19 nt, Artificial Sequence
  source: /note="Description of Artificial Sequence: Synthetic oligonucleotide"
guagugaagaaauguuguu

SEQ ID NO: 840 - RNA, 19 nt, Artificial Sequence
  source: /note="Description of Artificial Sequence: Synthetic oligonucleotide"
aaauguuguuacgauggag

SEQ ID NO: 841 - RNA, 19 nt, Artificial Sequence
  source: /note="Description of Artificial Sequence: Synthetic oligonucleotide"
cgauggagccugcguuaau

SEQ ID NO: 842 - RNA, 19 nt, Artificial Sequence
  source: /note="Description of Artificial Sequence: Synthetic oligonucleotide"
cguuaauaaugaugaaacc

SEQ ID NO: 843 - RNA, 19 nt, Artificial Sequence
  source: /note="Description of Artificial Sequence: Synthetic oligonucleotide"
augaugaaaccugugagca

SEQ ID NO: 844 - RNA, 19 nt, Artificial Sequence
  source: /note="Description of Artificial Sequence: Synthetic oligonucleotide"
cugugagcagcgagcugca

SEQ ID NO: 845 - RNA, 19 nt, Artificial Sequence
  source: /note="Description of Artificial Sequence: Synthetic oligonucleotide"
cgagcugcacggauuaguu

SEQ ID NO: 846 - RNA, 19 nt, Artificial Sequence
  source: /note="Description of Artificial Sequence: Synthetic oligonucleotide"
ggauuaguuuagggccaag

SEQ ID NO: 847 - RNA, 19 nt, Artificial Sequence
  source: /note="Description of Artificial Sequence: Synthetic oligonucleotide"
gggccaagaugcaucaaag

SEQ ID NO: 848 - RNA, 19 nt, Artificial Sequence
  source: /note="Description of Artificial Sequence: Synthetic oligonucleotide"
caucaaagcuuucacugaa

SEQ ID NO: 849 - RNA, 19 nt, Artificial Sequence
  source: /note="Description of Artificial Sequence: Synthetic oligonucleotide"
gcuuucacugaauguugug

SEQ ID NO: 850 - RNA, 19 nt, Artificial Sequence
  source: /note="Description of Artificial Sequence: Synthetic oligonucleotide"
aauguugugucgucgcaag

SEQ ID NO: 851 - RNA, 19 nt, Artificial Sequence
  source: /note="Description of Artificial Sequence: Synthetic oligonucleotide"
cgucgcaagccagcuccgu

SEQ ID NO: 852 - RNA, 19 nt, Artificial Sequence
  source: /note="Description of Artificial Sequence: Synthetic oligonucleotide"
gcuccgugcuaauaucucu

SEQ ID NO: 853 - RNA, 19 nt, Artificial Sequence
  source: /note="Description of Artificial Sequence: Synthetic oligonucleotide"
cuaauaucucucauaaaga

SEQ ID NO: 854 - RNA, 19 nt, Artificial Sequence
  source: /note="Description of Artificial Sequence: Synthetic oligonucleotide"
aaagacaugcaauugggaa

SEQ ID NO: 855 - RNA, 19 nt, Artificial Sequence
  source: /note="Description of Artificial Sequence: Synthetic oligonucleotide"
caauugggaaggcuacaca

SEQ ID NO: 856 - RNA, 19 nt, Artificial Sequence
  source: /note="Description of Artificial Sequence: Synthetic oligonucleotide"
gcuacacaugaagacccug

SEQ ID NO: 857 - RNA, 19 nt, Artificial Sequence
  source: /note="Description of Artificial Sequence: Synthetic oligonucleotide"
caugaagacccuguuacca

SEQ ID NO: 858 - RNA, 19 nt, Artificial Sequence
  source: /note="Description of Artificial Sequence: Synthetic oligonucleotide"
uaccaguaagcaagccaga

SEQ ID NO: 859 - RNA, 19 nt, Artificial Sequence
  source: /note="Description of Artificial Sequence: Synthetic oligonucleotide"
agcaagccagaaauucgga

SEQ ID NO: 860 - RNA, 19 nt, Artificial Sequence
  source: /note="Description of Artificial Sequence: Synthetic oligonucleotide"
agaaauucggaguuauuuu

SEQ ID NO: 861 - RNA, 19 nt, Artificial Sequence
  source: /note="Description of Artificial Sequence: Synthetic oligonucleotide"
aguuauuuuccagaaagcu

SEQ ID NO: 862 - RNA, 19 nt, Artificial Sequence
  source: /note="Description of Artificial Sequence: Synthetic oligonucleotide"
cagaaagcugguuguggga

SEQ ID NO: 863 - RNA, 19 nt, Artificial Sequence
  source: /note="Description of Artificial Sequence: Synthetic oligonucleotide"
gugggaaguucaucuuguu

SEQ ID NO: 864 - RNA, 19 nt, Artificial Sequence
  source: /note="Description of Artificial Sequence: Synthetic oligonucleotide"
ucaucuuguucccagaaga

SEQ ID NO: 865 - RNA, 19 nt, Artificial Sequence
  source: /note="Description of Artificial Sequence: Synthetic oligonucleotide"
ccagaagaaaacaguugca

SEQ ID NO: 866 - RNA, 19 nt, Artificial Sequence
  source: /note="Description of Artificial Sequence: Synthetic oligonucleotide"
caguugcaguuugcccuac

SEQ ID NO: 867 - RNA, 19 nt, Artificial Sequence
  source: /note="Description of Artificial Sequence: Synthetic oligonucleotide"
caguuugcccuaccugauu

SEQ ID NO: 868 - RNA, 19 nt, Artificial Sequence
  source: /note="Description of Artificial Sequence: Synthetic oligonucleotide"
ccugauucucuaaccaccu

SEQ ID NO: 869 - RNA, 19 nt, Artificial Sequence
  source: /note="Description of Artificial Sequence: Synthetic oligonucleotide"
accaccugggaaauucaag

SEQ ID NO: 870 - RNA, 19 nt, Artificial Sequence
  source: /note="Description of Artificial Sequence: Synthetic oligonucleotide"
gaaauucaaggcguuggca

SEQ ID NO: 871 - RNA, 19 nt, Artificial Sequence
  source: /note="Description of Artificial Sequence: Synthetic oligonucleotide"
cguuggcauuucaaacacu

SEQ ID NO: 872 - RNA, 19 nt, Artificial Sequence
  source: /note="Description of Artificial Sequence: Synthetic oligonucleotide"
cauuucaaacacugguaua

SEQ ID NO: 873 - RNA, 19 nt, Artificial Sequence
  source: /note="Description of Artificial Sequence: Synthetic oligonucleotide"
guauauguguugcugauac

SEQ ID NO: 874 - RNA, 19 nt, Artificial Sequence
  source: /note="Description of Artificial Sequence: Synthetic oligonucleotide"
ugcugauacugucaaggca

SEQ ID NO: 875 - RNA, 19 nt, Artificial Sequence
  source: /note="Description of Artificial Sequence: Synthetic oligonucleotide"
cugucaaggcaaagguguu

SEQ ID NO: 876 - RNA, 19 nt, Artificial Sequence
  source: /note="Description of Artificial Sequence: Synthetic oligonucleotide"
agguguucaaagaugucuu

SEQ ID NO: 877 - RNA, 19 nt, Artificial Sequence
  source: /note="Description of Artificial Sequence: Synthetic oligonucleotide"
caaagaugucuuccuggaa

SEQ ID NO: 878 - RNA, 19 nt, Artificial Sequence
  source: /note="Description of Artificial Sequence: Synthetic oligonucleotide"
cuuccuggaaaugaauaua

SEQ ID NO: 879 - RNA, 19 nt, Artificial Sequence
  source: /note="Description of Artificial Sequence: Synthetic oligonucleotide"
gaauauaccauauucuguu

SEQ ID NO: 880 - RNA, 19 nt, Artificial Sequence
  source: /note="Description of Artificial Sequence: Synthetic oligonucleotide"
auauucuguuguacgagga

SEQ ID NO: 881 - RNA, 19 nt, Artificial Sequence
  source: /note="Description of Artificial Sequence: Synthetic oligonucleotide"
cgaggagaacagauccaau

SEQ ID NO: 882 - RNA, 19 nt, Artificial Sequence
  source: /note="Description of Artificial Sequence: Synthetic oligonucleotide"
gaacagauccaauugaaag

SEQ ID NO: 883 - RNA, 19 nt, Artificial Sequence
  source: /note="Description of Artificial Sequence: Synthetic oligonucleotide"
gaaaggaacuguuuacaac

SEQ ID NO: 884 - RNA, 19 nt, Artificial Sequence
  source: /note="Description of Artificial Sequence: Synthetic oligonucleotide"
acuguuuacaacuauagga

SEQ ID NO: 885 - RNA, 19 nt, Artificial Sequence
  source: /note="Description of Artificial Sequence: Synthetic oligonucleotide"
aacuauaggacuucuggga

SEQ ID NO: 886 - RNA, 19 nt, Artificial Sequence
  source: /note="Description of Artificial Sequence: Synthetic oligonucleotide"
ugggaugcaguucuguguu

SEQ ID NO: 887 - RNA, 19 nt, Artificial Sequence
  source: /note="Description of Artificial Sequence: Synthetic oligonucleotide"
guucuguguuaaaaugucu

SEQ ID NO: 888 - RNA, 19 nt, Artificial Sequence
  source: /note="Description of Artificial Sequence: Synthetic oligonucleotide"
uuaaaaugucugcugugga

SEQ ID NO: 889 - RNA, 19 nt, Artificial Sequence
  source: /note="Description of Artificial Sequence: Synthetic oligonucleotide"
cuguggagggaaucugcac

SEQ ID NO: 890 - RNA, 19 nt, Artificial Sequence
  source: /note="Description of Artificial Sequence: Synthetic oligonucleotide"
ggaaucugcacuucggaaa

SEQ ID NO: 891 - RNA, 19 nt, Artificial Sequence
  source: /note="Description of Artificial Sequence: Synthetic oligonucleotide"
cggaaagcccagucauuga

SEQ ID NO: 892 - RNA, 19 nt, Artificial Sequence
  source: /note="Description of Artificial Sequence: Synthetic oligonucleotide"
ccagucauugaucaucagg

SEQ ID NO: 893 - RNA, 19 nt, Artificial Sequence
  source: /note="Description of Artificial Sequence: Synthetic oligonucleotide"
caucagggcacaaaguccu

SEQ ID NO: 894 - RNA, 19 nt, Artificial Sequence
  source: /note="Description of Artificial Sequence: Synthetic oligonucleotide"
ggcacaaaguccuccaaau

SEQ ID NO: 895 - RNA, 19 nt, Artificial Sequence
  source: /note="Description of Artificial Sequence: Synthetic oligonucleotide"
caaaugugugcgccagaaa

SEQ ID NO: 896 - RNA, 19 nt, Artificial Sequence
  source: /note="Description of Artificial Sequence: Synthetic oligonucleotide"
gcgccagaaaguagagggc

SEQ ID NO: 897 - RNA, 19 nt, Artificial Sequence
  source: /note="Description of Artificial Sequence: Synthetic oligonucleotide"
aguagagggcuccuccagu

SEQ ID NO: 898 - RNA, 19 nt, Artificial Sequence
  source: /note="Description of Artificial Sequence: Synthetic oligonucleotide"
ccuccagucacuuggugac

SEQ ID NO: 899 - RNA, 19 nt, Artificial Sequence
  source: /note="Description of Artificial Sequence: Synthetic oligonucleotide"
ucacuuggugacauucacu

SEQ ID NO: 900 - RNA, 19 nt, Artificial Sequence
  source: /note="Description of Artificial Sequence: Synthetic oligonucleotide"
cauucacugugcuuccucu

SEQ ID NO: 901 - RNA, 19 nt, Artificial Sequence
  source: /note="Description of Artificial Sequence: Synthetic oligonucleotide"
ggaaauuggccuucacaac

SEQ ID NO: 902 - RNA, 19 nt, Artificial Sequence
  source: /note="Description of Artificial Sequence: Synthetic oligonucleotide"
cuucacaacaucaauuuuu

SEQ ID NO: 903 - RNA, 19 nt, Artificial Sequence
  source: /note="Description of Artificial Sequence: Synthetic oligonucleotide"
aauuuuucacuggagacuu

SEQ ID NO: 904 - RNA, 19 nt, Artificial Sequence
  source: /note="Description of Artificial Sequence: Synthetic oligonucleotide"
cuggagacuugguuuggaa

SEQ ID NO: 905 - RNA, 19 nt, Artificial Sequence
  source: /note="Description of Artificial Sequence: Synthetic oligonucleotide"
gguuuggaaaagaaaucuu

SEQ ID NO: 906 - RNA, 19 nt, Artificial Sequence
  source: /note="Description of Artificial Sequence: Synthetic oligonucleotide"
aaucuuaguaaaaacauua

SEQ ID NO: 907 - RNA, 19 nt, Artificial Sequence
  source: /note="Description of Artificial Sequence: Synthetic oligonucleotide"
aaaaacauuacgaguggug

SEQ ID NO: 908 - RNA, 19 nt, Artificial Sequence
  source: /note="Description of Artificial Sequence: Synthetic oligonucleotide"
gaguggugccagaaggugu

SEQ ID NO: 909 - RNA, 19 nt, Artificial Sequence
  source: /note="Description of Artificial Sequence: Synthetic oligonucleotide"
agaaggugucaaaagggaa

SEQ ID NO: 910 - RNA, 19 nt, Artificial Sequence
  source: /note="Description of Artificial Sequence: Synthetic oligonucleotide"
ugucaaaagggaaagcuau

SEQ ID NO: 911 - RNA, 19 nt, Artificial Sequence
  source: /note="Description of Artificial Sequence: Synthetic oligonucleotide"
gcuauucugguguuacuuu

SEQ ID NO: 912 - RNA, 19 nt, Artificial Sequence
  source: /note="Description of Artificial Sequence: Synthetic oligonucleotide"
guguuacuuuggauccuag

SEQ ID NO: 913 - RNA, 19 nt, Artificial Sequence
  source: /note="Description of Artificial Sequence: Synthetic oligonucleotide"
ggauccuagggguauuuau

SEQ ID NO: 914 - RNA, 19 nt, Artificial Sequence
  source: /note="Description of Artificial Sequence: Synthetic oligonucleotide"
gguauuuaugguaccauua

SEQ ID NO: 915 - RNA, 19 nt, Artificial Sequence
  source: /note="Description of Artificial Sequence: Synthetic oligonucleotide"
guaccauuagcagacgaaa

SEQ ID NO: 916 - RNA, 19 nt, Artificial Sequence
  source: /note="Description of Artificial Sequence: Synthetic oligonucleotide"
cagacgaaaggaguuccca

SEQ ID NO: 917 - RNA, 19 nt, Artificial Sequence
  source: /note="Description of Artificial Sequence: Synthetic oligonucleotide"
aggaguucccauacaggau

SEQ ID NO: 918 - RNA, 19 nt, Artificial Sequence
  source: /note="Description of Artificial Sequence: Synthetic oligonucleotide"
cauacaggauacccuuaga

SEQ ID NO: 919 - RNA, 19 nt, Artificial Sequence
  source: /note="Description of Artificial Sequence: Synthetic oligonucleotide"
cuuagauuugguccccaaa

SEQ ID NO: 920 - RNA, 19 nt, Artificial Sequence
  source: /note="Description of Artificial Sequence: Synthetic oligonucleotide"
uccccaaaacagaaaucaa

SEQ ID NO: 921 - RNA, 19 nt, Artificial Sequence
  source: /note="Description of Artificial Sequence: Synthetic oligonucleotide"
acagaaaucaaaaggauuu

SEQ ID NO: 922 - RNA, 19 nt, Artificial Sequence
  source: /note="Description of Artificial Sequence: Synthetic oligonucleotide"
aaaggauuuugaguguaaa

SEQ ID NO: 923 - RNA, 19 nt, Artificial Sequence
  source: /note="Description of Artificial Sequence: Synthetic oligonucleotide"
aguguaaaaggacugcuug

SEQ ID NO: 924 - RNA, 19 nt, Artificial Sequence
  source: /note="Description of Artificial Sequence: Synthetic oligonucleotide"
aaggacugcuuguagguga

SEQ ID NO: 925 - RNA, 19 nt, Artificial Sequence
  source: /note="Description of Artificial Sequence: Synthetic oligonucleotide"
guaggugagaucuugucug

SEQ ID NO: 926 - RNA, 19 nt, Artificial Sequence
  source: /note="Description of Artificial Sequence: Synthetic oligonucleotide"
aucuugucugcaguucuaa

SEQ ID NO: 927 - RNA, 19 nt, Artificial Sequence
  source: /note="Description of Artificial Sequence: Synthetic oligonucleotide"
guucuaagucaggaaggca

SEQ ID NO: 928 - RNA, 19 nt, Artificial Sequence
  source: /note="Description of Artificial Sequence: Synthetic oligonucleotide"
gaaggcaucaauauccuaa

SEQ ID NO: 929 - RNA, 19 nt, Artificial Sequence
  source: /note="Description of Artificial Sequence: Synthetic oligonucleotide"
ucaauauccuaacccaccu

SEQ ID NO: 930 - RNA, 19 nt, Artificial Sequence
  source: /note="Description of Artificial Sequence: Synthetic oligonucleotide"
ccaccuccccaaagggagu

SEQ ID NO: 931 - RNA, 19 nt, Artificial Sequence
  source: /note="Description of Artificial Sequence: Synthetic oligonucleotide"
ccccaaagggagugcagag

SEQ ID NO: 932 - RNA, 19 nt, Artificial Sequence
  source: /note="Description of Artificial Sequence: Synthetic oligonucleotide"
gugcagaggcggagcugau

SEQ ID NO: 933 - RNA, 19 nt, Artificial Sequence
  source: /note="Description of Artificial Sequence: Synthetic oligonucleotide"
ggagcugaugagcguuguc

SEQ ID NO: 934 - RNA, 19 nt, Artificial Sequence
  source: /note="Description of Artificial Sequence: Synthetic oligonucleotide"
cguugucccaguauucuau

SEQ ID NO: 935 - RNA, 19 nt, Artificial Sequence
  source: /note="Description of Artificial Sequence: Synthetic oligonucleotide"
ccaguauucuauguuuuuc

SEQ ID NO: 936 - RNA, 19 nt, Artificial Sequence
  source: /note="Description of Artificial Sequence: Synthetic oligonucleotide"
guuuuucacuaccuggaaa

SEQ ID NO: 937 - RNA, 19 nt, Artificial Sequence
  source: /note="Description of Artificial Sequence: Synthetic oligonucleotide"
ccuggaaacaggaaaucau

SEQ ID NO: 938 - RNA, 19 nt, Artificial Sequence
  source: /note="Description of Artificial Sequence: Synthetic oligonucleotide"
ggaacauuuuucauucuga

SEQ ID NO: 939 - RNA, 19 nt, Artificial Sequence
  source: /note="Description of Artificial Sequence: Synthetic oligonucleotide"
cauucugacccauuaauug

SEQ ID NO: 940 - RNA, 19 nt, Artificial Sequence
  source: /note="Description of Artificial Sequence: Synthetic oligonucleotide"
ccauuaauugaaaagcaga

SEQ ID NO: 941 - RNA, 19 nt, Artificial Sequence
  source: /note="Description of Artificial Sequence: Synthetic oligonucleotide"
aaagcagaaacugaagaaa

SEQ ID NO: 942 - RNA, 19 nt, Artificial Sequence
  source: /note="Description of Artificial Sequence: Synthetic oligonucleotide"
aacugaagaaaaaauuaaa

SEQ ID NO: 943 - RNA, 19 nt, Artificial Sequence
  source: /note="Description of Artificial Sequence: Synthetic oligonucleotide"
aaaaaauuaaaagaaggga

SEQ ID NO: 944 - RNA, 19 nt, Artificial Sequence
  source: /note="Description of Artificial Sequence: Synthetic oligonucleotide"
agggauguugagcauuaug

SEQ ID NO: 945 - RNA, 19 nt, Artificial Sequence
  source: /note="Description of Artificial Sequence: Synthetic oligonucleotide"
gagcauuauguccuacaga

SEQ ID NO: 946 - RNA, 19 nt, Artificial Sequence
  source: /note="Description of Artificial Sequence: Synthetic oligonucleotide"
uguccuacagaaaugcuga

SEQ ID NO: 947 - RNA, 19 nt, Artificial Sequence
  source: /note="Description of Artificial Sequence: Synthetic oligonucleotide"
aaugcugacuacucuuaca

SEQ ID NO: 948 - RNA, 19 nt, Artificial Sequence
  source: /note="Description of Artificial Sequence: Synthetic oligonucleotide"
uacucuuacagugugugga

SEQ ID NO: 949 - RNA, 19 nt, Artificial Sequence
  source: /note="Description of Artificial Sequence: Synthetic oligonucleotide"
aguguguggaaggguggaa

SEQ ID NO: 950 - RNA, 19 nt, Artificial Sequence
  source: /note="Description of Artificial Sequence: Synthetic oligonucleotide"
ggguggaagugcuagcacu

SEQ ID NO: 951 - RNA, 19 nt, Artificial Sequence
  source: /note="Description of Artificial Sequence: Synthetic oligonucleotide"
gcuagcacuugguuaacag

SEQ ID NO: 952 - RNA, 19 nt, Artificial Sequence
  source: /note="Description of Artificial Sequence: Synthetic oligonucleotide"
gguuaacagcuuuugcuuu

SEQ ID NO: 953 - RNA, 19 nt, Artificial Sequence
  source: /note="Description of Artificial Sequence: Synthetic oligonucleotide"
ugcuuuaagaguacuugga

SEQ ID NO: 954 - RNA, 19 nt, Artificial Sequence
  source: /note="Description of Artificial Sequence: Synthetic oligonucleotide"
guacuuggacaaguaaaua

SEQ ID NO: 955 - RNA, 19 nt, Artificial Sequence
  source: /note="Description of Artificial Sequence: Synthetic oligonucleotide"
caaguaaauaaauacguag

SEQ ID NO: 956 - RNA, 19 nt, Artificial Sequence
  source: /note="Description of Artificial Sequence: Synthetic oligonucleotide"
auaaauacguagagcagaa

SEQ ID NO: 957 - RNA, 19 nt, Artificial Sequence
  source: /note="Description of Artificial Sequence: Synthetic oligonucleotide"
gagcagaaccaaaauucaa

SEQ ID NO: 958 - RNA, 19 nt, Artificial Sequence
  source: /note="Description of Artificial Sequence: Synthetic oligonucleotide"
aauucaauuuguaauucuu

SEQ ID NO: 959 - RNA, 19 nt, Artificial Sequence
  source: /note="Description of Artificial Sequence: Synthetic oligonucleotide"
guaauucuuuauuguggcu

SEQ ID NO: 960 - RNA, 19 nt, Artificial Sequence
  source: /note="Description of Artificial Sequence: Synthetic oligonucleotide"
auuguggcuaguugagaau

SEQ ID NO: 961 - RNA, 19 nt, Artificial Sequence
  source: /note="Description of Artificial Sequence: Synthetic oligonucleotide"
cuaguugagaauuaucaau

SEQ ID NO: 962 - RNA, 19 nt, Artificial Sequence
  source: /note="Description of Artificial Sequence: Synthetic oligonucleotide"
uuaucaauuagauaaugga

SEQ ID NO: 963 - RNA, 19 nt, Artificial Sequence
  source: /note="Description of Artificial Sequence: Synthetic oligonucleotide"
aauggaucuuucaaggaaa

SEQ ID NO: 964 - RNA, 19 nt, Artificial Sequence
  source: /note="Description of Artificial Sequence: Synthetic oligonucleotide"
cuuucaaggaaaauucaca

SEQ ID NO: 965 - RNA, 19 nt, Artificial Sequence
  source: /note="Description of Artificial Sequence: Synthetic oligonucleotide"
aauucacaguaucaaccaa

SEQ ID NO: 966 - RNA, 19 nt, Artificial Sequence
  source: /note="Description of Artificial Sequence: Synthetic oligonucleotide"
guaucaaccaauaaaauua

SEQ ID NO: 967 - RNA, 19 nt, Artificial Sequence
  source: /note="Description of Artificial Sequence: Synthetic oligonucleotide"
aaaauuacaggguaccuug

SEQ ID NO: 968 - RNA, 19 nt, Artificial Sequence
  source: /note="Description of Artificial Sequence: Synthetic oligonucleotide"
aggguaccuugccuguuga

SEQ ID NO: 969 - RNA, 19 nt, Artificial Sequence
  source: /note="Description of Artificial Sequence: Synthetic oligonucleotide"
guugaagcccgagagaaca

SEQ ID NO: 970 - RNA, 19 nt, Artificial Sequence
  source: /note="Description of Artificial Sequence: Synthetic oligonucleotide"
ccgagagaacagcuuauau

SEQ ID NO: 971 - RNA, 19 nt, Artificial Sequence
  source: /note="Description of Artificial Sequence: Synthetic oligonucleotide"
gcuuauaucuuacagccuu

SEQ ID NO: 972 - RNA, 19 nt, Artificial Sequence
  source: /note="Description of Artificial Sequence: Synthetic oligonucleotide"
cuuacagccuuuacuguga

SEQ ID NO: 973 - RNA, 19 nt, Artificial Sequence
  source: /note="Description of Artificial Sequence: Synthetic oligonucleotide"
gaauuagaaaggcuuucga

SEQ ID NO: 974 - RNA, 19 nt, Artificial Sequence
  source: /note="Description of Artificial Sequence: Synthetic oligonucleotide"
ggcuuucgauauaugcccc

SEQ ID NO: 975 - RNA, 19 nt, Artificial Sequence
  source: /note="Description of Artificial Sequence: Synthetic oligonucleotide"
gauauaugcccccugguga

SEQ ID NO: 976 - RNA, 19 nt, Artificial Sequence
  source: /note="Description of Artificial Sequence: Synthetic oligonucleotide"
ggugaaaaucgacacagcu

SEQ ID NO: 977 - RNA, 19 nt, Artificial Sequence
  source: /note="Description of Artificial Sequence: Synthetic oligonucleotide"
cgacacagcucuaauuaaa

SEQ ID NO: 978 - RNA, 19 nt, Artificial Sequence
  source: /note="Description of Artificial Sequence: Synthetic oligonucleotide"
gcucuaauuaaagcugaca

SEQ ID NO: 979 - RNA, 19 nt, Artificial Sequence
  source: /note="Description of Artificial Sequence: Synthetic oligonucleotide"
cugacaacuuucugcuuga

SEQ ID NO: 980 - RNA, 19 nt, Artificial Sequence
  source: /note="Description of Artificial Sequence: Synthetic oligonucleotide"
cuuucugcuugaaaauaca

SEQ ID NO: 981 - RNA, 19 nt, Artificial Sequence
  source: /note="Description of Artificial Sequence: Synthetic oligonucleotide"
aaaauacacugccagccca

SEQ ID NO: 982 - RNA, 19 nt, Artificial Sequence
  source: /note="Description of Artificial Sequence: Synthetic oligonucleotide"
agcccagagcaccuuuaca

SEQ ID NO: 983 - RNA, 19 nt, Artificial Sequence
  source: /note="Description of Artificial Sequence: Synthetic oligonucleotide"
gcaccuuuacauuggccau

SEQ ID NO: 984 - RNA, 19 nt, Artificial Sequence
  source: /note="Description of Artificial Sequence: Synthetic oligonucleotide"
acauuggccauuucugcgu

SEQ ID NO: 985 - RNA, 19 nt, Artificial Sequence
  source: /note="Description of Artificial Sequence: Synthetic oligonucleotide"
cugcguaugcucuuucccu

SEQ ID NO: 986 - RNA, 19 nt, Artificial Sequence
  source: /note="Description of Artificial Sequence: Synthetic oligonucleotide"
cuuucccugggagauaaaa

SEQ ID NO: 987 - RNA, 19 nt, Artificial Sequence
  source: /note="Description of Artificial Sequence: Synthetic oligonucleotide"
gagauaaaacucacccaca

SEQ ID NO: 988 - RNA, 19 nt, Artificial Sequence
  source: /note="Description of Artificial Sequence: Synthetic oligonucleotide"
acucacccacaguuucguu

SEQ ID NO: 989 - RNA, 19 nt, Artificial Sequence
  source: /note="Description of Artificial Sequence: Synthetic oligonucleotide"
caguuucguucaauuguuu

SEQ ID NO: 990 - RNA, 19 nt, Artificial Sequence
  source: /note="Description of Artificial Sequence: Synthetic oligonucleotide"
caauuguuucagcuuugaa

SEQ ID NO: 991 - RNA, 19 nt, Artificial Sequence
  source: /note="Description of Artificial Sequence: Synthetic oligonucleotide"
cuuugaagagagaagcuuu

SEQ ID NO: 992 - RNA, 19 nt, Artificial Sequence
  source: /note="Description of Artificial Sequence: Synthetic oligonucleotide"
gagagaagcuuugguuaaa

SEQ ID NO: 993 - RNA, 19 nt, Artificial Sequence
  source: /note="Description of Artificial Sequence: Synthetic oligonucleotide"
guuaaagguaauccaccca

SEQ ID NO: 994 - RNA, 19 nt, Artificial Sequence
  source: /note="Description of Artificial Sequence: Synthetic oligonucleotide"
aauccacccauuuaucguu

SEQ ID NO: 995 - RNA, 19 nt, Artificial Sequence
  source: /note="Description of Artificial Sequence: Synthetic oligonucleotide"
cauuuaucguuuuuggaaa

SEQ ID NO: 996 - RNA, 19 nt, Artificial Sequence
  source: /note="Description of Artificial Sequence: Synthetic oligonucleotide"
uuuggaaagacaaucuuca

SEQ ID NO: 997 - RNA, 19 nt, Artificial Sequence
  source: /note="Description of Artificial Sequence: Synthetic oligonucleotide"
aaucuucagcauaaagaca

SEQ ID NO: 998 - RNA, 19 nt, Artificial Sequence
  source: /note="Description of Artificial Sequence: Synthetic oligonucleotide"
cauaaagacagcucuguac

SEQ ID NO: 999 - RNA, 19 nt, Artificial Sequence
  source: /note="Description of Artificial Sequence: Synthetic oligonucleotide"
cucuguaccuaacacuggu

SEQ ID NO: 1000 - RNA, 19 nt, Artificial Sequence
  source: /note="Description of Artificial Sequence: Synthetic oligonucleotide"
acacugguacggcacguau

SEQ ID NO: 1001 - RNA, 19 nt, Artificial Sequence
  source: /note="Description of Artificial Sequence: Synthetic oligonucleotide"
ggcacguaugguagaaaca

SEQ ID NO: 1002 - RNA, 19 nt, Artificial Sequence
  source: /note="Description of Artificial Sequence: Synthetic oligonucleotide"
gguagaaacaacugccuau

SEQ ID NO: 1003 - RNA, 19 nt, Artificial Sequence
  source: /note="Description of Artificial Sequence: Synthetic oligonucleotide"
caacugccuaugcuuuacu

SEQ ID NO: 1004 - RNA, 19 nt, Artificial Sequence
  source: /note="Description of Artificial Sequence: Synthetic oligonucleotide"
cuuuacucaccagucugaa

SEQ ID NO: 1005 - RNA, 19 nt, Artificial Sequence
  source: /note="Description of Artificial Sequence: Synthetic oligonucleotide"
gucugaacuugaaagauau

SEQ ID NO: 1006 - RNA, 19 nt, Artificial Sequence
  source: /note="Description of Artificial Sequence: Synthetic oligonucleotide"
acuugaaagauauaaauua

SEQ ID NO: 1007 - RNA, 19 nt, Artificial Sequence
  source: /note="Description of Artificial Sequence: Synthetic oligonucleotide"
uauaaauuauguuaaccca

SEQ ID NO: 1008 - RNA, 19 nt, Artificial Sequence
  source: /note="Description of Artificial Sequence: Synthetic oligonucleotide"
guuaacccagucaucaaau

SEQ ID NO: 1009 - RNA, 19 nt, Artificial Sequence
  source: /note="Description of Artificial Sequence: Synthetic oligonucleotide"
ucaucaaauggcuaucaga

SEQ ID NO: 1010 - RNA, 19 nt, Artificial Sequence
  source: /note="Description of Artificial Sequence: Synthetic oligonucleotide"
uaucagaagagcagaggua

SEQ ID NO: 1011 - RNA, 19 nt, Artificial Sequence
  source: /note="Description of Artificial Sequence: Synthetic oligonucleotide"
agagguauggagguggcuu

SEQ ID NO: 1012 - RNA, 19 nt, Artificial Sequence
  source: /note="Description of Artificial Sequence: Synthetic oligonucleotide"
gagguggcuuuuauucaac

SEQ ID NO: 1013 - RNA, 19 nt, Artificial Sequence
  source: /note="Description of Artificial Sequence: Synthetic oligonucleotide"
uauucaacccaggacacaa

SEQ ID NO: 1014 - RNA, 19 nt, Artificial Sequence
  source: /note="Description of Artificial Sequence: Synthetic oligonucleotide"
aggacacaaucaaugccau

SEQ ID NO: 1015 - RNA, 19 nt, Artificial Sequence
  source: /note="Description of Artificial Sequence: Synthetic oligonucleotide"
caaucaaugccauugaggg

SEQ ID NO: 1016 - RNA, 19 nt, Artificial Sequence
  source: /note="Description of Artificial Sequence: Synthetic oligonucleotide"
cauugagggccugacggaa

SEQ ID NO: 1017 - RNA, 19 nt, Artificial Sequence
  source: /note="Description of Artificial Sequence: Synthetic oligonucleotide"
acggaauauucacuccugg

SEQ ID NO: 1018 - RNA, 19 nt, Artificial Sequence
  source: /note="Description of Artificial Sequence: Synthetic oligonucleotide"
uucacuccugguuaaacaa

SEQ ID NO: 1019 - RNA, 19 nt, Artificial Sequence
  source: /note="Description of Artificial Sequence: Synthetic oligonucleotide"
gguuaaacaacuccgcuug

SEQ ID NO: 1020 - RNA, 19 nt, Artificial Sequence
  source: /note="Description of Artificial Sequence: Synthetic oligonucleotide"
ccgcuugaguauggacauc

SEQ ID NO: 1021 - RNA, 19 nt, Artificial Sequence
  source: /note="Description of Artificial Sequence: Synthetic oligonucleotide"
ggacaucgauguuucuuac

SEQ ID NO: 1022 - RNA, 19 nt, Artificial Sequence
  source: /note="Description of Artificial Sequence: Synthetic oligonucleotide"
cgauguuucuuacaagcau

SEQ ID NO: 1023 - RNA, 19 nt, Artificial Sequence
  source: /note="Description of Artificial Sequence: Synthetic oligonucleotide"
caagcauaaaggugccuua

SEQ ID NO: 1024 - RNA, 19 nt, Artificial Sequence
  source: /note="Description of Artificial Sequence: Synthetic oligonucleotide"
gugccuuacauaauuauaa

SEQ ID NO: 1025 - RNA, 19 nt, Artificial Sequence
  source: /note="Description of Artificial Sequence: Synthetic oligonucleotide"
acauaauuauaaaaugaca

SEQ ID NO: 1026 - RNA, 19 nt, Artificial Sequence
  source: /note="Description of Artificial Sequence: Synthetic oligonucleotide"
aaaaugacagacaagaauu

SEQ ID NO: 1027 - RNA, 19 nt, Artificial Sequence
  source: /note="Description of Artificial Sequence: Synthetic oligonucleotide"
caagaauuuccuugggagg

SEQ ID NO: 1028 - RNA, 19 nt, Artificial Sequence
  source: /note="Description of Artificial Sequence: Synthetic oligonucleotide"
ccuugggaggccaguagag

SEQ ID NO: 1029 - RNA, 19 nt, Artificial Sequence
  source: /note="Description of Artificial Sequence: Synthetic oligonucleotide"
aguagaggugcuucucaau

SEQ ID NO: 1030 - RNA, 19 nt, Artificial Sequence
  source: /note="Description of Artificial Sequence: Synthetic oligonucleotide"
cuucucaaugaugaccuca

SEQ ID NO: 1031 - RNA, 19 nt, Artificial Sequence
  source: /note="Description of Artificial Sequence: Synthetic oligonucleotide"
ugaccucauugucaguaca

SEQ ID NO: 1032 - RNA, 19 nt, Artificial Sequence
  source: /note="Description of Artificial Sequence: Synthetic oligonucleotide"
gucaguacaggauuuggca

SEQ ID NO: 1033 - RNA, 19 nt, Artificial Sequence
  source: /note="Description of Artificial Sequence: Synthetic oligonucleotide"
aggauuuggcaguggcuug

SEQ ID NO: 1034 - RNA, 19 nt, Artificial Sequence
  source: /note="Description of Artificial Sequence: Synthetic oligonucleotide"
uggcuuggcuacaguacau

SEQ ID NO: 1035 - RNA, 19 nt, Artificial Sequence
  source: /note="Description of Artificial Sequence: Synthetic oligonucleotide"
gcuacaguacauguaacaa

SEQ ID NO: 1036 - RNA, 19 nt, Artificial Sequence
  source: /note="Description of Artificial Sequence: Synthetic oligonucleotide"
aacaacuguaguucacaaa

SEQ ID NO: 1037 - RNA, 19 nt, Artificial Sequence
  source: /note="Description of Artificial Sequence: Synthetic oligonucleotide"
guaguucacaaaaccagua

SEQ ID NO: 1038 - RNA, 19 nt, Artificial Sequence
  source: /note="Description of Artificial Sequence: Synthetic oligonucleotide"
aaaccaguaccucugagga

SEQ ID NO: 1039 - RNA, 19 nt, Artificial Sequence
  source: /note="Description of Artificial Sequence: Synthetic oligonucleotide"
ugaggaaguuugcagcuuu

SEQ ID NO: 1040 - RNA, 19 nt, Artificial Sequence
  source: /note="Description of Artificial Sequence: Synthetic oligonucleotide"
ugcagcuuuuauuugaaaa

SEQ ID NO: 1041 - RNA, 19 nt, Artificial Sequence
  source: /note="Description of Artificial Sequence: Synthetic oligonucleotide"
auuugaaaaucgauacuca

SEQ ID NO: 1042 - RNA, 19 nt, Artificial Sequence
  source: /note="Description of Artificial Sequence: Synthetic oligonucleotide"
cgauacucaggauauugaa

SEQ ID NO: 1043 - RNA, 19 nt, Artificial Sequence
  source: /note="Description of Artificial Sequence: Synthetic oligonucleotide"
ggauauugaagcaucccac

SEQ ID NO: 1044 - RNA, 19 nt, Artificial Sequence
  source: /note="Description of Artificial Sequence: Synthetic oligonucleotide"
gaagcaucccacuacagag

SEQ ID NO: 1045 - RNA, 19 nt, Artificial Sequence
  source: /note="Description of Artificial Sequence: Synthetic oligonucleotide"
acuacagaggcuacggaaa

SEQ ID NO: 1046 - RNA, 19 nt, Artificial Sequence
  source: /note="Description of Artificial Sequence: Synthetic oligonucleotide"
cggaaacucugauuacaaa

SEQ ID NO: 1047 - RNA, 19 nt, Artificial Sequence
  source: /note="Description of Artificial Sequence: Synthetic oligonucleotide"
ugauuacaaacgcauagua

SEQ ID NO: 1048 - RNA, 19 nt, Artificial Sequence
  source: /note="Description of Artificial Sequence: Synthetic oligonucleotide"
gcauaguagcaugugccag

SEQ ID NO: 1049 - RNA, 19 nt, Artificial Sequence
  source: /note="Description of Artificial Sequence: Synthetic oligonucleotide"
gcaugugccagcuacaagc

SEQ ID NO: 1050 - RNA, 19 nt, Artificial Sequence
  source: /note="Description of Artificial Sequence: Synthetic oligonucleotide"
cuacaagcccagcagggaa

SEQ ID NO: 1051 - RNA, 19 nt, Artificial Sequence
  source: /note="Description of Artificial Sequence: Synthetic oligonucleotide"
cagcagggaagaaucauca

SEQ ID NO: 1052 - RNA, 19 nt, Artificial Sequence
  source: /note="Description of Artificial Sequence: Synthetic oligonucleotide"
gaaucaucaucuggauccu

SEQ ID NO: 1053 - RNA, 19 nt, Artificial Sequence
  source: /note="Description of Artificial Sequence: Synthetic oligonucleotide"
gauccucucaugcggugau

SEQ ID NO: 1054 - RNA, 19 nt, Artificial Sequence
  source: /note="Description of Artificial Sequence: Synthetic oligonucleotide"
cucaugcggugauggacau

SEQ ID NO: 1055 - RNA, 19 nt, Artificial Sequence
  source: /note="Description of Artificial Sequence: Synthetic oligonucleotide"
gauggacaucuccuugccu

SEQ ID NO: 1056 - RNA, 19 nt, Artificial Sequence
  source: /note="Description of Artificial Sequence: Synthetic oligonucleotide"
cuugccuacuggaaucagu

SEQ ID NO: 1057 - RNA, 19 nt, Artificial Sequence
  source: /note="Description of Artificial Sequence: Synthetic oligonucleotide"
gaaucagugcaaaugaaga

SEQ ID NO: 1058 - RNA, 19 nt, Artificial Sequence
  source: /note="Description of Artificial Sequence: Synthetic oligonucleotide"
aaaugaagaagacuuaaaa

SEQ ID NO: 1059 - RNA, 19 nt, Artificial Sequence
  source: /note="Description of Artificial Sequence: Synthetic oligonucleotide"
gaagacuuaaaagcccuug

SEQ ID NO: 1060 - RNA, 19 nt, Artificial Sequence
  source: /note="Description of Artificial Sequence: Synthetic oligonucleotide"
ccuuguggaagggguggau

SEQ ID NO: 1061 - RNA, 19 nt, Artificial Sequence
  source: /note="Description of Artificial Sequence: Synthetic oligonucleotide"
gaagggguggaucaacuau

SEQ ID NO: 1062 - RNA, 19 nt, Artificial Sequence
  source: /note="Description of Artificial Sequence: Synthetic oligonucleotide"
aucaacuauucacugauua

SEQ ID NO: 1063 - RNA, 19 nt, Artificial Sequence
  source: /note="Description of Artificial Sequence: Synthetic oligonucleotide"
cacugauuaccaaaucaaa

SEQ ID NO: 1064 - RNA, 19 nt, Artificial Sequence
  source: /note="Description of Artificial Sequence: Synthetic oligonucleotide"
aucaaagauggacauguua

SEQ ID NO: 1065 - RNA, 19 nt, Artificial Sequence
  source: /note="Description of Artificial Sequence: Synthetic oligonucleotide"
ggacauguuauucugcaac

SEQ ID NO: 1066 - RNA, 19 nt, Artificial Sequence
  source: /note="Description of Artificial Sequence: Synthetic oligonucleotide"
ucugcaacugaauucgauu

SEQ ID NO: 1067 - RNA, 19 nt, Artificial Sequence
  source: /note="Description of Artificial Sequence: Synthetic oligonucleotide"
gaauucgauucccuccagu

SEQ ID NO: 1068 - RNA, 19 nt, Artificial Sequence
  source: /note="Description of Artificial Sequence: Synthetic oligonucleotide"
cccuccagugauuuccuuu

SEQ ID NO: 1069 - RNA, 19 nt, Artificial Sequence
  source: /note="Description of Artificial Sequence: Synthetic oligonucleotide"
gauuuccuuuguguacgau

SEQ ID NO: 1070 - RNA, 19 nt, Artificial Sequence
  source: /note="Description of Artificial Sequence: Synthetic oligonucleotide"
guacgauuccggauauuug

SEQ ID NO: 1071 - RNA, 19 nt, Artificial Sequence
  source: /note="Description of Artificial Sequence: Synthetic oligonucleotide"
cggauauuugaacucuuug

SEQ ID NO: 1072 - RNA, 19 nt, Artificial Sequence
  source: /note="Description of Artificial Sequence: Synthetic oligonucleotide"
acucuuugaaguuggguuu

SEQ ID NO: 1073 - RNA, 19 nt, Artificial Sequence
  source: /note="Description of Artificial Sequence: Synthetic oligonucleotide"
aguuggguuucucaguccu

SEQ ID NO: 1074 - RNA, 19 nt, Artificial Sequence
  source: /note="Description of Artificial Sequence: Synthetic oligonucleotide"
uucucaguccugccacuuu

SEQ ID NO: 1075 - RNA, 19 nt, Artificial Sequence
  source: /note="Description of Artificial Sequence: Synthetic oligonucleotide"
cacuuucacaguguacgaa

SEQ ID NO: 1076 - RNA, 19 nt, Artificial Sequence
  source: /note="Description of Artificial Sequence: Synthetic oligonucleotide"
cacaguguacgaauaccac

SEQ ID NO: 1077 - RNA, 19 nt, Artificial Sequence
  source: /note="Description of Artificial Sequence: Synthetic oligonucleotide"
accacagaccagauaaaca

SEQ ID NO: 1078 - RNA, 19 nt, Artificial Sequence
  source: /note="Description of Artificial Sequence: Synthetic oligonucleotide"
ccagauaaacaguguacca

SEQ ID NO: 1079 - RNA, 19 nt, Artificial Sequence
  source: /note="Description of Artificial Sequence: Synthetic oligonucleotide"
caguguaccauguuuuaua

SEQ ID NO: 1080 - RNA, 19 nt, Artificial Sequence
  source: /note="Description of Artificial Sequence: Synthetic oligonucleotide"
guuuuauagcacuuccaau

SEQ ID NO: 1081 - RNA, 19 nt, Artificial Sequence
  source: /note="Description of Artificial Sequence: Synthetic oligonucleotide"
cuuccaauaucaaaauuca

SEQ ID NO: 1082 - RNA, 19 nt, Artificial Sequence
  source: /note="Description of Artificial Sequence: Synthetic oligonucleotide"
aucaaaauucagaaagucu

SEQ ID NO: 1083 - RNA, 19 nt, Artificial Sequence
  source: /note="Description of Artificial Sequence: Synthetic oligonucleotide"
gaaagucugugaaggagcc

SEQ ID NO: 1084 - RNA, 19 nt, Artificial Sequence
  source: /note="Description of Artificial Sequence: Synthetic oligonucleotide"
gaaggagccgcgugcaagu

SEQ ID NO: 1085 - RNA, 19 nt, Artificial Sequence
  source: /note="Description of Artificial Sequence: Synthetic oligonucleotide"
cgugcaaguguguagaagc

SEQ ID NO: 1086 - RNA, 19 nt, Artificial Sequence
  source: /note="Description of Artificial Sequence: Synthetic oligonucleotide"
guagaagcugauugugggc

SEQ ID NO: 1087 - RNA, 19 nt, Artificial Sequence
  source: /note="Description of Artificial Sequence: Synthetic oligonucleotide"
cugauugugggcaaaugca

SEQ ID NO: 1088 - RNA, 19 nt, Artificial Sequence
  source: /note="Description of Artificial Sequence: Synthetic oligonucleotide"
gcaaaugcaggaagaauug

SEQ ID NO: 1089 - RNA, 19 nt, Artificial Sequence
  source: /note="Description of Artificial Sequence: Synthetic oligonucleotide"
gaagaauuggaucugacaa

SEQ ID NO: 1090 - RNA, 19 nt, Artificial Sequence
  source: /note="Description of Artificial Sequence: Synthetic oligonucleotide"
cugacaaucucugcagaga

SEQ ID NO: 1091 - RNA, 19 nt, Artificial Sequence
  source: /note="Description of Artificial Sequence: Synthetic oligonucleotide"
gcagagacaagaaaacaaa

SEQ ID NO: 1092 - RNA, 19 nt, Artificial Sequence
  source: /note="Description of Artificial Sequence: Synthetic oligonucleotide"
caagaaaacaaacagcaug

SEQ ID NO: 1093 - RNA, 19 nt, Artificial Sequence
  source: /note="Description of Artificial Sequence: Synthetic oligonucleotide"
acagcauguaaaccagaga

SEQ ID NO: 1094 - RNA, 19 nt, Artificial Sequence
  source: /note="Description of Artificial Sequence: Synthetic oligonucleotide"
ccagagauugcauaugcuu

SEQ ID NO: 1095 - RNA, 19 nt, Artificial Sequence
  source: /note="Description of Artificial Sequence: Synthetic oligonucleotide"
gcauaugcuuauaaaguua

SEQ ID NO: 1096 - RNA, 19 nt, Artificial Sequence
  source: /note="Description of Artificial Sequence: Synthetic oligonucleotide"
uuauaaaguuagcaucaca

SEQ ID NO: 1097 - RNA, 19 nt, Artificial Sequence
  source: /note="Description of Artificial Sequence: Synthetic oligonucleotide"
caucacauccaucacugua

SEQ ID NO: 1098 - RNA, 19 nt, Artificial Sequence
  source: /note="Description of Artificial Sequence: Synthetic oligonucleotide"
ucacuguagaaaauguuuu

SEQ ID NO: 1099 - RNA, 19 nt, Artificial Sequence
  source: /note="Description of Artificial Sequence: Synthetic oligonucleotide"
agaaaauguuuuugucaag

SEQ ID NO: 1100 - RNA, 19 nt, Artificial Sequence
  source: /note="Description of Artificial Sequence: Synthetic oligonucleotide"
uuugucaaguacaaggcaa

SEQ ID NO: 1101 - RNA, 19 nt, Artificial Sequence
  source: /note="Description of Artificial Sequence: Synthetic oligonucleotide"
aggcaacccuucuggauau

SEQ ID NO: 1102 - RNA, 19 nt, Artificial Sequence
  source: /note="Description of Artificial Sequence: Synthetic oligonucleotide"
ccuucuggauaucuacaaa

SEQ ID NO: 1103 - RNA, 19 nt, Artificial Sequence
  source: /note="Description of Artificial Sequence: Synthetic oligonucleotide"
uaucuacaaaacuggggaa

SEQ ID NO: 1104 - RNA, 19 nt, Artificial Sequence
  source: /note="Description of Artificial Sequence: Synthetic oligonucleotide"
cuggggaagcuguugcuga

SEQ ID NO: 1105 - RNA, 19 nt, Artificial Sequence
  source: /note="Description of Artificial Sequence: Synthetic oligonucleotide"
cuguugcugagaaagacuc

SEQ ID NO: 1106 - RNA, 19 nt, Artificial Sequence
  source: /note="Description of Artificial Sequence: Synthetic oligonucleotide"
gacucugagauuaccuuca

SEQ ID NO: 1107 - RNA, 19 nt, Artificial Sequence
  source: /note="Description of Artificial Sequence: Synthetic oligonucleotide"
gagauuaccuucauuaaaa

SEQ ID NO: 1108 - RNA, 19 nt, Artificial Sequence
  source: /note="Description of Artificial Sequence: Synthetic oligonucleotide"
auuaaaaagguaaccugua

SEQ ID NO: 1109 - RNA, 19 nt, Artificial Sequence
  source: /note="Description of Artificial Sequence: Synthetic oligonucleotide"
uaaccuguacuaacgcuga

SEQ ID NO: 1110 - RNA, 19 nt, Artificial Sequence
  source: /note="Description of Artificial Sequence: Synthetic oligonucleotide"
cuaacgcugagcugguaaa

SEQ ID NO: 1111 - RNA, 19 nt, Artificial Sequence
  source: /note="Description of Artificial Sequence: Synthetic oligonucleotide"
gguaaaaggaagacaguac

SEQ ID NO: 1112 - RNA, 19 nt, Artificial Sequence
  source: /note="Description of Artificial Sequence: Synthetic oligonucleotide"
gaagacaguacuuaauuau

SEQ ID NO: 1113 - RNA, 19 nt, Artificial Sequence
  source: /note="Description of Artificial Sequence: Synthetic oligonucleotide"
cuuaauuauggguaaagaa

SEQ ID NO: 1114 - RNA, 19 nt, Artificial Sequence
  source: /note="Description of Artificial Sequence: Synthetic oligonucleotide"
uaaagaagcccuccagaua

SEQ ID NO: 1115 - RNA, 19 nt, Artificial Sequence
  source: /note="Description of Artificial Sequence: Synthetic oligonucleotide"
ccuccagauaaaauacaau

SEQ ID NO: 1116 - RNA, 19 nt, Artificial Sequence
  source: /note="Description of Artificial Sequence: Synthetic oligonucleotide"
aaauacaauuucaguuuca

SEQ ID NO: 1117 - RNA, 19 nt, Artificial Sequence
  source: /note="Description of Artificial Sequence: Synthetic oligonucleotide"
caguuucagguacaucuac

SEQ ID NO: 1118 - RNA, 19 nt, Artificial Sequence
  source: /note="Description of Artificial Sequence: Synthetic oligonucleotide"
gguacaucuacccuuuaga

SEQ ID NO: 1119 - RNA, 19 nt, Artificial Sequence
  source: /note="Description of Artificial Sequence: Synthetic oligonucleotide"
ccuuuagauuccuugaccu

SEQ ID NO: 1120 - RNA, 19 nt, Artificial Sequence
  source: /note="Description of Artificial Sequence: Synthetic oligonucleotide"
ccuugaccuggauugaaua

SEQ ID NO: 1121 - RNA, 19 nt, Artificial Sequence
  source: /note="Description of Artificial Sequence: Synthetic oligonucleotide"
ggauugaauacuggccuag

SEQ ID NO: 1122 - RNA, 19 nt, Artificial Sequence
  source: /note="Description of Artificial Sequence: Synthetic oligonucleotide"
cuggccuagagacacaaca

SEQ ID NO: 1123 - RNA, 19 nt, Artificial Sequence
  source: /note="Description of Artificial Sequence: Synthetic oligonucleotide"
gagacacaacauguucauc

SEQ ID NO: 1124 - RNA, 19 nt, Artificial Sequence
  source: /note="Description of Artificial Sequence: Synthetic oligonucleotide"
guucaucgugucaagcauu

SEQ ID NO: 1125 - RNA, 19 nt, Artificial Sequence
  source: /note="Description of Artificial Sequence: Synthetic oligonucleotide"
gucaagcauuuuuagcuaa

SEQ ID NO: 1126 - RNA, 19 nt, Artificial Sequence
  source: /note="Description of Artificial Sequence: Synthetic oligonucleotide"
agcuaauuuagaugaauuu

SEQ ID NO: 1127 - RNA, 19 nt, Artificial Sequence
  source: /note="Description of Artificial Sequence: Synthetic oligonucleotide"
agaugaauuugccgaagau

SEQ ID NO: 1128 - RNA, 19 nt, Artificial Sequence
  source: /note="Description of Artificial Sequence: Synthetic oligonucleotide"
ccgaagauaucuuuuuaaa

SEQ ID NO: 1129 - RNA, 19 nt, Artificial Sequence
  source: /note="Description of Artificial Sequence: Synthetic oligonucleotide"
cuuuuuaaauggaugcuaa

SEQ ID NO: 1130 - RNA, 19 nt, Artificial Sequence
  source: /note="Description of Artificial Sequence: Synthetic oligonucleotide"
ggaugcuaaaauuccugaa

SEQ ID NO: 1131 - RNA, 19 nt, Artificial Sequence
  source: /note="Description of Artificial Sequence: Synthetic oligonucleotide"
uaaaauuccugaaguucag

SEQ ID NO: 1132 - RNA, 19 nt, Artificial Sequence
  source: /note="Description of Artificial Sequence: Synthetic oligonucleotide"
aguucagcugcauacaguu

SEQ ID NO: 1133 - RNA, 19 nt, Artificial Sequence
  source: /note="Description of Artificial Sequence: Synthetic oligonucleotide"
gcauacaguuugcacuuau

SEQ ID NO: 1134 - RNA, 19 nt, Artificial Sequence
  source: /note="Description of Artificial Sequence: Synthetic oligonucleotide"
acuuauggacuccuguugu

SEQ ID NO: 1135 - RNA, 19 nt, Artificial Sequence
  source: /note="Description of Artificial Sequence: Synthetic oligonucleotide"
ggacuccuguuguugaagu

SEQ ID NO: 1136 - RNA, 19 nt, Artificial Sequence
  source: /note="Description of Artificial Sequence: Synthetic oligonucleotide"
uguugaaguucguuuuuuu

SEQ ID NO: 1137 - RNA, 19 nt, Artificial Sequence
  source: /note="Description of Artificial Sequence: Synthetic oligonucleotide"
uuuuuuguuuucuucuuuu

SEQ ID NO: 1138 - RNA, 19 nt, Artificial Sequence
  source: /note="Description of Artificial Sequence: Synthetic oligonucleotide"
ucuucuuuuuuuaaacauu

SEQ ID NO: 1139 - RNA, 19 nt, Artificial Sequence
  source: /note="Description of Artificial Sequence: Synthetic oligonucleotide"
uuuuuaaacauucauagcu

SEQ ID NO: 1140 - RNA, 19 nt, Artificial Sequence
  source: /note="Description of Artificial Sequence: Synthetic oligonucleotide"
auagcuggucuuauuugua

SEQ ID NO: 1141 - RNA, 19 nt, Artificial Sequence
  source: /note="Description of Artificial Sequence: Synthetic oligonucleotide"
gucuuauuuguaaagcuca

SEQ ID NO: 1142 - RNA, 19 nt, Artificial Sequence
  source: /note="Description of Artificial Sequence: Synthetic oligonucleotide"
aaagcucacuuuacuuaga

SEQ ID NO: 1143 - RNA, 19 nt, Artificial Sequence
  source: /note="Description of Artificial Sequence: Synthetic oligonucleotide"
acuuagaauuaguggcacu

SEQ ID NO: 1144 - RNA, 19 nt, Artificial Sequence
  source: /note="Description of Artificial Sequence: Synthetic oligonucleotide"
aguggcacuugcuuuuauu

SEQ ID NO: 1145 - RNA, 19 nt, Artificial Sequence
  source: /note="Description of Artificial Sequence: Synthetic oligonucleotide"
gcuuuuauuagagaaugau

SEQ ID NO: 1146 - RNA, 19 nt, Artificial Sequence
  source: /note="Description of Artificial Sequence: Synthetic oligonucleotide"
gagaaugauuucaaaugcu

SEQ ID NO: 1147 - RNA, 19 nt, Artificial Sequence
  source: /note="Description of Artificial Sequence: Synthetic oligonucleotide"
uuucaaaugcuguaacuuu

SEQ ID NO: 1148 - RNA, 19 nt, Artificial Sequence
  source: /note="Description of Artificial Sequence: Synthetic oligonucleotide"
guaacuuucugaaauaaca

SEQ ID NO: 1149 - RNA, 19 nt, Artificial Sequence
  source: /note="Description of Artificial Sequence: Synthetic oligonucleotide"
gaaauaacauggccuugga

SEQ ID NO: 1150 - RNA, 19 nt, Artificial Sequence
  source: /note="Description of Artificial Sequence: Synthetic oligonucleotide"
ccuuggagggcaugaagac

SEQ ID NO: 1151 - RNA, 19 nt, Artificial Sequence
  source: /note="Description of Artificial Sequence: Synthetic oligonucleotide"
agggcaugaagacagauac

SEQ ID NO: 1152 - RNA, 19 nt, Artificial Sequence
  source: /note="Description of Artificial Sequence: Synthetic oligonucleotide"
gauacuccuccaagguuau

SEQ ID NO: 1153 - RNA, 19 nt, Artificial Sequence
  source: /note="Description of Artificial Sequence: Synthetic oligonucleotide"
ccuccaagguuauuggaca

SEQ ID NO: 1154 - RNA, 19 nt, Artificial Sequence
  source: /note="Description of Artificial Sequence: Synthetic oligonucleotide"
ggacaccggaaacaauaaa

SEQ ID NO: 1155 - RNA, 19 nt, Artificial Sequence
  source: /note="Description of Artificial Sequence: Synthetic oligonucleotide"
gaaacaauaaauuggaaca

SEQ ID NO: 1156 - RNA, 19 nt, Artificial Sequence
  source: /note="Description of Artificial Sequence: Synthetic oligonucleotide"
auuggaacaccuccucaaa

SEQ ID NO: 1157 - RNA, 19 nt, Artificial Sequence
  source: /note="Description of Artificial Sequence: Synthetic oligonucleotide"
uccucaaaccuaccacuca

SEQ ID NO: 1158 - RNA, 19 nt, Artificial Sequence
  source: /note="Description of Artificial Sequence: Synthetic oligonucleotide"
cuaccacucaggaauguuu

SEQ ID NO: 1159 - RNA, 19 nt, Artificial Sequence
  source: /note="Description of Artificial Sequence: Synthetic oligonucleotide"
aauguuugcuggggccgaa

SEQ ID NO: 1160 - RNA, 19 nt, Artificial Sequence
  source: /note="Description of Artificial Sequence: Synthetic oligonucleotide"
ugcuggggccgaaagaaca

SEQ ID NO: 1161 - RNA, 19 nt, Artificial Sequence
  source: /note="Description of Artificial Sequence: Synthetic oligonucleotide"
aaagaacaguccauugaaa

SEQ ID NO: 1162 - RNA, 19 nt, Artificial Sequence
  source: /note="Description of Artificial Sequence: Synthetic oligonucleotide"
cauugaaagggaguauuac

SEQ ID NO: 1163 - RNA, 19 nt, Artificial Sequence
  source: /note="Description of Artificial Sequence: Synthetic oligonucleotide"
ggaguauuacaaaaacaug

SEQ ID NO: 1164 - RNA, 19 nt, Artificial Sequence
  source: /note="Description of Artificial Sequence: Synthetic oligonucleotide"
aaaacauggccuuugcuug

SEQ ID NO: 1165 - RNA, 19 nt, Artificial Sequence
  source: /note="Description of Artificial Sequence: Synthetic oligonucleotide"
gccuuugcuugaaagaaaa

SEQ ID NO: 1166 - RNA, 19 nt, Artificial Sequence
  source: /note="Description of Artificial Sequence: Synthetic oligonucleotide"
gaaagaaaauaccaaggaa

SEQ ID NO: 1167 - RNA, 19 nt, Artificial Sequence
  source: /note="Description of Artificial Sequence: Synthetic oligonucleotide"
ccaaggaacaggaaacuga

SEQ ID NO: 1168 - RNA, 19 nt, Artificial Sequence
  source: /note="Description of Artificial Sequence: Synthetic oligonucleotide"
aacugaucauuaaagccug

SEQ ID NO: 1169 - RNA, 19 nt, Artificial Sequence
  source: /note="Description of Artificial Sequence: Synthetic oligonucleotide"
auuaaagccugaguuugcu

SEQ ID NO: 1170 - RNA, 19 nt, Artificial Sequence
  source: /note="Description of Artificial Sequence: Synthetic oligonucleotide"
uagcaggaaaccacggaua

SEQ ID NO: 1171 - RNA, 19 nt, Artificial Sequence
  source: /note="Description of Artificial Sequence: Synthetic oligonucleotide"
uuggagguagcaggaaacc

SEQ ID NO: 1172 - RNA, 19 nt, Artificial Sequence
  source: /note="Description of Artificial Sequence: Synthetic oligonucleotide"
aaaggcccaugguuggagg

SEQ ID NO: 1173 - RNA, 19 nt, Artificial Sequence
  source: /note="Description of Artificial Sequence: Synthetic oligonucleotide"
aaguauucccaaaaggccc

SEQ ID NO: 1174 - RNA, 19 nt, Artificial Sequence
  source: /note="Description of Artificial Sequence: Synthetic oligonucleotide"
uuaaaaaacaaaguauucc

SEQ ID NO: 1175 - RNA, 19 nt, Artificial Sequence
  source: /note="Description of Artificial Sequence: Synthetic oligonucleotide"
ggaagauuaaaaaacaaag

SEQ ID NO: 1176 - RNA, 19 nt, Artificial Sequence
  source: /note="Description of Artificial Sequence: Synthetic oligonucleotide"
ccagguuuuccccaggaag

SEQ ID NO: 1177 - RNA, 19 nt, Artificial Sequence
  source: /note="Description of Artificial Sequence: Synthetic oligonucleotide"
uccuguccccagguuuucc

SEQ ID NO: 1178 - RNA, 19 nt, Artificial Sequence
  source: /note="Description of Artificial Sequence: Synthetic oligonucleotide"
auauguuugcuccuguccc

SEQ ID NO: 1179 - RNA, 19 nt, Artificial Sequence
  source: /note="Description of Artificial Sequence: Synthetic oligonucleotide"
cugaaaugacauauguuug

SEQ ID NO: 1180 - RNA, 19 nt, Artificial Sequence
  source: /note="Description of Artificial Sequence: Synthetic oligonucleotide"
uauuuuuggugcugaaaug

SEQ ID NO: 1181 - RNA, 19 nt, Artificial Sequence
  source: /note="Description of Artificial Sequence: Synthetic oligonucleotide"
cacggaauauuuuuggugc

SEQ ID NO: 1182 - RNA, 19 nt, Artificial Sequence
  source: /note="Description of Artificial Sequence: Synthetic oligonucleotide"
uucagaugcuccaacacgg

SEQ ID NO: 1183 - RNA, 19 nt, Artificial Sequence
  source: /note="Description of Artificial Sequence: Synthetic oligonucleotide"
caauauuuucagaugcucc

SEQ ID NO: 1184 - RNA, 19 nt, Artificial Sequence
  source: /note="Description of Artificial Sequence: Synthetic oligonucleotide"
cuugaaucacaauauuuuc

SEQ ID NO: 1185 - RNA, 19 nt, Artificial Sequence
  source: /note="Description of Artificial Sequence: Synthetic oligonucleotide"
guauccauaaacuugaauc

SEQ ID NO: 1186 - RNA, 19 nt, Artificial Sequence
  source: /note="Description of Artificial Sequence: Synthetic oligonucleotide"
caaaugcuucaguguaucc

SEQ ID NO: 1187 - RNA, 19 nt, Artificial Sequence
  source: /note="Description of Artificial Sequence: Synthetic oligonucleotide"
uuguugcaucaaaugcuuc

SEQ ID NO: 1188 - RNA, 19 nt, Artificial Sequence
  source: /note="Description of Artificial Sequence: Synthetic oligonucleotide"
uuuaauagagauuguugca

SEQ ID NO: 1189 - RNA, 19 nt, Artificial Sequence
  source: /note="Description of Artificial Sequence: Synthetic oligonucleotide"
auaacuuuuaauagagauu

SEQ ID NO: 1190 - RNA, 19 nt, Artificial Sequence
  source: /note="Description of Artificial Sequence: Synthetic oligonucleotide"
uuuuuuaucaggauaacuu

SEQ ID NO: 1191 - RNA, 19 nt, Artificial Sequence
  source: /note="Description of Artificial Sequence: Synthetic oligonucleotide"
uaacuaaauuuuuuaucag

SEQ ID NO: 1192 - RNA, 19 nt, Artificial Sequence
  source: /note="Description of Artificial Sequence: Synthetic oligonucleotide"
uggccugaggaguaacuaa

SEQ ID NO: 1193 - RNA, 19 nt, Artificial Sequence
  source: /note="Description of Artificial Sequence: Synthetic oligonucleotide"
aaaugaacauggccugagg

SEQ ID NO: 1194 - RNA, 19 nt, Artificial Sequence
  source: /note="Description of Artificial Sequence: Synthetic oligonucleotide"
uucucugaggauaaaugaa

SEQ ID NO: 1195 - RNA, 19 nt, Artificial Sequence
  source: /note="Description of Artificial Sequence: Synthetic oligonucleotide"
uuggaauuuauucucugag

SEQ ID NO: 1196 - RNA, 19 nt, Artificial Sequence
  source: /note="Description of Artificial Sequence: Synthetic oligonucleotide"
cagaguuuuggaauuuauu

SEQ ID NO: 1197 - RNA, 19 nt, Artificial Sequence
  source: /note="Description of Artificial Sequence: Synthetic oligonucleotide"
uauuguuaagauugcagag

SEQ ID NO: 1198 - RNA, 19 nt, Artificial Sequence
  source: /note="Description of Artificial Sequence: Synthetic oligonucleotide"
uuuugguuguauuguuaag

SEQ ID NO: 1199 - RNA, 19 nt, Artificial Sequence
  source: /note="Description of Artificial Sequence: Synthetic oligonucleotide"
caggcaauuguuuugguug

SEQ ID NO: 1200 - RNA, 19 nt, Artificial Sequence
  source: /note="Description of Artificial Sequence: Synthetic oligonucleotide"
uuuguccuccaggcaauug

SEQ ID NO: 1201 - RNA, 19 nt, Artificial Sequence
  source: /note="Description of Artificial Sequence: Synthetic oligonucleotide"
aagaaacuggguuuugucc

SEQ ID NO: 1202 - RNA, 19 nt, Artificial Sequence
  source: /note="Description of Artificial Sequence: Synthetic oligonucleotide"
aauacacauaagaaacugg

SEQ ID NO: 1203 - RNA, 19 nt, Artificial Sequence
  source: /note="Description of Artificial Sequence: Synthetic oligonucleotide"
acaacuuccaaauacacau

SEQ ID NO: 1204 - RNA, 19 nt, Artificial Sequence
  source: /note="Description of Artificial Sequence: Synthetic oligonucleotide"
augcuuugauacaacuucc

SEQ ID NO: 1205 - RNA, 19 nt, Artificial Sequence
  source: /note="Description of Artificial Sequence: Synthetic oligonucleotide"
uugaaaaaugcuuugauac

SEQ ID NO: 1206 - RNA, 19 nt, Artificial Sequence
  source: /note="Description of Artificial Sequence: Synthetic oligonucleotide"
uucuuuuugauuuugaaaa

SEQ ID NO: 1207 - RNA, 19 nt, Artificial Sequence
  source: /note="Description of Artificial Sequence: Synthetic oligonucleotide"
guuauuggcauucuuuuug

SEQ ID NO: 1208 - RNA, 19 nt, Artificial Sequence
  source: /note="Description of Artificial Sequence: Synthetic oligonucleotide"
auugucauagguuauuggc

SEQ ID NO: 1209 - RNA, 19 nt, Artificial Sequence
  source: /note="Description of Artificial Sequence: Synthetic oligonucleotide"
agaaauccauugucauagg

SEQ ID NO: 1210 - RNA, 19 nt, Artificial Sequence
  source: /note="Description of Artificial Sequence: Synthetic oligonucleotide"
augaaugaagagaaaucca

SEQ ID NO: 1211 - RNA, 19 nt, Artificial Sequence
  source: /note="Description of Artificial Sequence: Synthetic oligonucleotide"
agguuugucuguaugaaug

SEQ ID NO: 1212 - RNA, 19 nt, Artificial Sequence
  source: /note="Description of Artificial Sequence: Synthetic oligonucleotide"
guauaaacagguuugucug

SEQ ID NO: 1213 - RNA, 19 nt, Artificial Sequence
  source: /note="Description of Artificial Sequence: Synthetic oligonucleotide"
acuggucuggaguauaaac

SEQ ID NO: 1214 - RNA, 19 nt, Artificial Sequence
  source: /note="Description of Artificial Sequence: Synthetic oligonucleotide"
aacuuuuacugacuggucu

SEQ ID NO: 1215 - RNA, 19 nt, Artificial Sequence
  source: /note="Description of Artificial Sequence: Synthetic oligonucleotide"
auaaacucuaacuuuuacu

SEQ ID NO: 1216 - RNA, 19 nt, Artificial Sequence
  source: /note="Description of Artificial Sequence: Synthetic oligonucleotide"
cauucaacgaauaaacucu

SEQ ID NO: 1217 - RNA, 19 nt, Artificial Sequence
  source: /note="Description of Artificial Sequence: Synthetic oligonucleotide"
uucaagucgucauucaacg

SEQ ID NO: 1218 - RNA, 19 nt, Artificial Sequence
  source: /note="Description of Artificial Sequence: Synthetic oligonucleotide"
ucuuuuggcuggcuucaag

SEQ ID NO: 1219 - RNA, 19 nt, Artificial Sequence
  source: /note="Description of Artificial Sequence: Synthetic oligonucleotide"
caguuucucuuuuggcugg

SEQ ID NO: 1220 - RNA, 19 nt, Artificial Sequence
  source: /note="Description of Artificial Sequence: Synthetic oligonucleotide"
augaaaguuaagacaguuu

SEQ ID NO: 1221 - RNA, 19 nt, Artificial Sequence
  source: /note="Description of Artificial Sequence: Synthetic oligonucleotide"
uucaggaucuaugaaaguu

SEQ ID NO: 1222 - RNA, 19 nt, Artificial Sequence
  source: /note="Description of Artificial Sequence: Synthetic oligonucleotide"
ugauccuucaggaucuaug

SEQ ID NO: 1223 - RNA, 19 nt, Artificial Sequence
  source: /note="Description of Artificial Sequence: Synthetic oligonucleotide"
ugucaacuucugauccuuc

SEQ ID NO: 1224 - RNA, 19 nt, Artificial Sequence
  source: /note="Description of Artificial Sequence: Synthetic oligonucleotide"
aauuucuucuaccauguca

SEQ ID NO: 1225 - RNA, 19 nt, Artificial Sequence
  source: /note="Description of Artificial Sequence: Synthetic oligonucleotide"
caauaugaucaauuucuuc

SEQ ID NO: 1226 - RNA, 19 nt, Artificial Sequence
  source: /note="Description of Artificial Sequence: Synthetic oligonucleotide"
agauaauuccaauaugauc

SEQ ID NO: 1227 - RNA, 19 nt, Artificial Sequence
  source: /note="Description of Artificial Sequence: Synthetic oligonucleotide"
caggaaaagagauaauucc

SEQ ID NO: 1228 - RNA, 19 nt, Artificial Sequence
  source: /note="Description of Artificial Sequence: Synthetic oligonucleotide"
cuugaagucaggaaaagag

SEQ ID NO: 1229 - RNA, 19 nt, Artificial Sequence
  source: /note="Description of Artificial Sequence: Synthetic oligonucleotide"
uuagacggaaucuugaagu

SEQ ID NO: 1230 - RNA, 19 nt, Artificial Sequence
  source: /note="Description of Artificial Sequence: Synthetic oligonucleotide"
cauaucuaggauuagacgg

SEQ ID NO: 1231 - RNA, 19 nt, Artificial Sequence
  source: /note="Description of Artificial Sequence: Synthetic oligonucleotide"
uccacauaccauaucuagg

SEQ ID NO: 1232 - RNA, 19 nt, Artificial Sequence
  source: /note="Description of Artificial Sequence: Synthetic oligonucleotide"
uuagccuugaucguccaca

SEQ ID NO: 1233 - RNA, 19 nt, Artificial Sequence
  source: /note="Description of Artificial Sequence: Synthetic oligonucleotide"
uuauauuuagccuugaucg

SEQ ID NO: 1234 - RNA, 19 nt, Artificial Sequence
  source: /note="Description of Artificial Sequence: Synthetic oligonucleotide"
ugaaaaguccucuuuauau

SEQ ID NO: 1235 - RNA, 19 nt, Artificial Sequence
  source: /note="Description of Artificial Sequence: Synthetic oligonucleotide"
caguuguugaaaaguccuc

SEQ ID NO: 1236 - RNA, 19 nt, Artificial Sequence
  source: /note="Description of Artificial Sequence: Synthetic oligonucleotide"
aaauaugcgguuccaguug

SEQ ID NO: 1237 - RNA, 19 nt, Artificial Sequence
  source: /note="Description of Artificial Sequence: Synthetic oligonucleotide"
uuuaacuucaaaauaugcg

SEQ ID NO: 1238 - RNA, 19 nt, Artificial Sequence
  source: /note="Description of Artificial Sequence: Synthetic oligonucleotide"
aagacauauucuuuaacuu

SEQ ID NO: 1239 - RNA, 19 nt, Artificial Sequence
  source: /note="Description of Artificial Sequence: Synthetic oligonucleotide"
aauguggcaagacauauuc

SEQ ID NO: 1240 - RNA, 19 nt, Artificial Sequence
  source: /note="Description of Artificial Sequence: Synthetic oligonucleotide"
uugagacagaaaaaugugg

SEQ ID NO: 1241 - RNA, 19 nt, Artificial Sequence
  source: /note="Description of Artificial Sequence: Synthetic oligonucleotide"
ucuggcucgauugagacag

SEQ ID NO: 1242 - RNA, 19 nt, Artificial Sequence
  source: /note="Description of Artificial Sequence: Synthetic oligonucleotide"
uuauauucuggcucgauug

SEQ ID NO: 1243 - RNA, 19 nt, Artificial Sequence
  source: /note="Description of Artificial Sequence: Synthetic oligonucleotide"
aaccaaugaaauuauauuc

SEQ ID NO: 1244 - RNA, 19 nt, Artificial Sequence
  source: /note="Description of Artificial Sequence: Synthetic oligonucleotide"
uaaaguucuuguaaccaau

SEQ ID NO: 1245 - RNA, 19 nt, Artificial Sequence
  source: /note="Description of Artificial Sequence: Synthetic oligonucleotide"
ucaaaauucuuaaaguucu

SEQ ID NO: 1246 - RNA, 19 nt, Artificial Sequence
  source: /note="Description of Artificial Sequence: Synthetic oligonucleotide"
uauaguaauuucaaaauuc

SEQ ID NO: 1247 - RNA, 19 nt, Artificial Sequence
  source: /note="Description of Artificial Sequence: Synthetic oligonucleotide"
uugcuuuuauaguaauuuc

SEQ ID NO: 1248 - RNA, 19 nt, Artificial Sequence
  source: /note="Description of Artificial Sequence: Synthetic oligonucleotide"
uauaaaaauaucuugcuuu

SEQ ID NO: 1249 - RNA, 19 nt, Artificial Sequence
  source: /note="Description of Artificial Sequence: Synthetic oligonucleotide"
uacuuuauuauaaaaauau

SEQ ID NO: 1250 - RNA, 19 nt, Artificial Sequence
  source: /note="Description of Artificial Sequence: Synthetic oligonucleotide"
ucagccucagugacuacuu

SEQ ID NO: 1251 - RNA, 19 nt, Artificial Sequence
  source: /note="Description of Artificial Sequence: Synthetic oligonucleotide"
auaaacgucagccucagug

SEQ ID NO: 1252 - RNA, 19 nt, Artificial Sequence
  source: /note="Description of Artificial Sequence: Synthetic oligonucleotide"
uccaaaugugauauaaacg

SEQ ID NO: 1253 - RNA, 19 nt, Artificial Sequence
  source: /note="Description of Artificial Sequence: Synthetic oligonucleotide"
uucucuuauuccaaaugug

SEQ ID NO: 1254 - RNA, 19 nt, Artificial Sequence
  source: /note="Description of Artificial Sequence: Synthetic oligonucleotide"
uuuuaagucuucucuuauu

SEQ ID NO: 1255 - RNA, 19 nt, Artificial Sequence
  source: /note="Description of Artificial Sequence: Synthetic oligonucleotide"
uuuuugaucaucuuuuaag

SEQ ID NO: 1256 - RNA, 19 nt, Artificial Sequence
  source: /note="Description of Artificial Sequence: Synthetic oligonucleotide"
ucauuucuuuuugaucauc

SEQ ID NO: 1257 - RNA, 19 nt, Artificial Sequence
  source: /note="Description of Artificial Sequence: Synthetic oligonucleotide"
auugcuguuugcaucauuu

SEQ ID NO: 1258 - RNA, 19 nt, Artificial Sequence
  source: /note="Description of Artificial Sequence: Synthetic oligonucleotide"
uuguguuuugcauugcugu

SEQ ID NO: 1259 - RNA, 19 nt, Artificial Sequence
  source: /note="Description of Artificial Sequence: Synthetic oligonucleotide"
uuuaucaacauuguguuuu

SEQ ID NO: 1260 - RNA, 19 nt, Artificial Sequence
  source: /note="Description of Artificial Sequence: Synthetic oligonucleotide"
auuccauuuaucaacauug

SEQ ID NO: 1261 - RNA, 19 nt, Artificial Sequence
  source: /note="Description of Artificial Sequence: Synthetic oligonucleotide"
augugacuugagcaauucc

SEQ ID NO: 1262 - RNA, 19 nt, Artificial Sequence
  source: /note="Description of Artificial Sequence: Synthetic oligonucleotide"
aaucaaaugugacuugagc

SEQ ID NO: 1263 - RNA, 19 nt, Artificial Sequence
  source: /note="Description of Artificial Sequence: Synthetic oligonucleotide"
ugcuguuucagaaucaaau

SEQ ID NO: 1264 - RNA, 19 nt, Artificial Sequence
  source: /note="Description of Artificial Sequence: Synthetic oligonucleotide"
uucuuugacugcuguuuca

SEQ ID NO: 1265 - RNA, 19 nt, Artificial Sequence
  source: /note="Description of Artificial Sequence: Synthetic oligonucleotide"
guaguaugacaguucuuug

SEQ ID NO: 1266 - RNA, 19 nt, Artificial Sequence
  source: /note="Description of Artificial Sequence: Synthetic oligonucleotide"
ucuucuaaacuguaguaug

SEQ ID NO: 1267 - RNA, 19 nt, Artificial Sequence
  source: /note="Description of Artificial Sequence: Synthetic oligonucleotide"
guuuaaaucuucuaaacug

SEQ ID NO: 1268 - RNA, 19 nt, Artificial Sequence
  source: /note="Description of Artificial Sequence: Synthetic oligonucleotide"
uaaagguacuuguuguuua

SEQ ID NO: 1269 - RNA, 19 nt, Artificial Sequence
  source: /note="Description of Artificial Sequence: Synthetic oligonucleotide"
agcaauauaaagguacuug

SEQ ID NO: 1270 - RNA, 19 nt, Artificial Sequence
  source: /note="Description of Artificial Sequence: Synthetic oligonucleotide"
uaugacuguuacagcaaua

SEQ ID NO: 1271 - RNA, 19 nt, Artificial Sequence
  source: /note="Description of Artificial Sequence: Synthetic oligonucleotide"
uguagacucuaugacuguu

SEQ ID NO: 1272 - RNA, 19 nt, Artificial Sequence
  source: /note="Description of Artificial Sequence: Synthetic oligonucleotide"
aaauccaccuguagacucu

SEQ ID NO: 1273 - RNA, 19 nt, Artificial Sequence
  source: /note="Description of Artificial Sequence: Synthetic oligonucleotide"
cugccucuucagaaaaucc

SEQ ID NO: 1274 - RNA, 19 nt, Artificial Sequence
  source: /note="Description of Artificial Sequence: Synthetic oligonucleotide"
cagguauuucugccucuuc

SEQ ID NO: 1275 - RNA, 19 nt, Artificial Sequence
  source: /note="Description of Artificial Sequence: Synthetic oligonucleotide"
uuugaugccagguauuucu

SEQ ID NO: 1276 - RNA, 19 nt, Artificial Sequence
  source: /note="Description of Artificial Sequence: Synthetic oligonucleotide"
gagaggacauauuugaugc

SEQ ID NO: 1277 - RNA, 19 nt, Artificial Sequence
  source: /note="Description of Artificial Sequence: Synthetic oligonucleotide"
uuuguagggagagaggaca

SEQ ID NO: 1278 - RNA, 19 nt, Artificial Sequence
  source: /note="Description of Artificial Sequence: Synthetic oligonucleotide"
aggaguagcaaccaaauuc

SEQ ID NO: 1279 - RNA, 19 nt, Artificial Sequence
  source: /note="Description of Artificial Sequence: Synthetic oligonucleotide"
ucaggaaaagaggaguagc

SEQ ID NO: 1280 - RNA, 19 nt, Artificial Sequence
  source: /note="Description of Artificial Sequence: Synthetic oligonucleotide"
ccaggcuucaggaaaagag

SEQ ID NO: 1281 - RNA, 19 nt, Artificial Sequence
  source: /note="Description of Artificial Sequence: Synthetic oligonucleotide"
ugggauauggaaucccagg

SEQ ID NO: 1282 - RNA, 19 nt, Artificial Sequence
  source: /note="Description of Artificial Sequence: Synthetic oligonucleotide"
ugcaccuugaugggauaug

SEQ ID NO: 1283 - RNA, 19 nt, Artificial Sequence
  source: /note="Description of Artificial Sequence: Synthetic oligonucleotide"
uuaaccugcaccuugaugg

SEQ ID NO: 1284 - RNA, 19 nt, Artificial Sequence
  source: /note="Description of Artificial Sequence: Synthetic oligonucleotide"
caagcgaaucuuuaaccug

SEQ ID NO: 1285 - RNA, 19 nt, Artificial Sequence
  source: /note="Description of Artificial Sequence: Synthetic oligonucleotide"
uaccaacuggucaagcgaa

SEQ ID NO: 1286 - RNA, 19 nt, Artificial Sequence
  source: /note="Description of Artificial Sequence: Synthetic oligonucleotide"
gacuccuccuaccaacugg

SEQ ID NO: 1287 - RNA, 19 nt, Artificial Sequence
  source: /note="Description of Artificial Sequence: Synthetic oligonucleotide"
guguuacugggacuccucc

SEQ ID NO: 1288 - RNA, 19 nt, Artificial Sequence
  source: /note="Description of Artificial Sequence: Synthetic oligonucleotide"
ugugcauucaguguuacug

SEQ ID NO: 1289 - RNA, 19 nt, Artificial Sequence
  source: /note="Description of Artificial Sequence: Synthetic oligonucleotide"
aucaauuguuugugcauuc

SEQ ID NO: 1290 - RNA, 19 nt, Artificial Sequence
  source: /note="Description of Artificial Sequence: Synthetic oligonucleotide"
uugguuuacaucaauuguu

SEQ ID NO: 1291 - RNA, 19 nt, Artificial Sequence
  source: /note="Description of Artificial Sequence: Synthetic oligonucleotide"
ucagaugucucuugguuua

SEQ ID NO: 1292 - RNA, 19 nt, Artificial Sequence
  source: /note="Description of Artificial Sequence: Synthetic oligonucleotide"
cuuggauccaagucagaug

SEQ ID NO: 1293 - RNA, 19 nt, Artificial Sequence
  source: /note="Description of Artificial Sequence: Synthetic oligonucleotide"
uuacacuuuugcuuggauc

SEQ ID NO: 1294 - RNA, 19 nt, Artificial Sequence
  source: /note="Description of Artificial Sequence: Synthetic oligonucleotide"
aacacguguuacacuuuug

SEQ ID NO: 1295 - RNA, 19 nt, Artificial Sequence
  source: /note="Description of Artificial Sequence: Synthetic oligonucleotide"
uccaucaucaacacguguu

SEQ ID NO: 1296 - RNA, 19 nt, Artificial Sequence
  source: /note="Description of Artificial Sequence: Synthetic oligonucleotide"
aaaggaagcuacuccauca

SEQ ID NO: 1297 - RNA, 19 nt, Artificial Sequence
  source: /note="Description of Artificial Sequence: Synthetic oligonucleotide"
uaagcacaaaggaagcuac

SEQ ID NO: 1298 - RNA, 19 nt, Artificial Sequence
  source: /note="Description of Artificial Sequence: Synthetic oligonucleotide"
uccagaugggagauuaagc

SEQ ID NO: 1299 - RNA, 19 nt, Artificial Sequence
  source: /note="Description of Artificial Sequence: Synthetic oligonucleotide"
gcaccgucacuccagaugg

SEQ ID NO: 1300 - RNA, 19 nt, Artificial Sequence
  source: /note="Description of Artificial Sequence: Synthetic oligonucleotide"
uuaaacuccagcaccguca

SEQ ID NO: 1301 - RNA, 19 nt, Artificial Sequence
  source: /note="Description of Artificial Sequence: Synthetic oligonucleotide"
uuugacauuaaacuccagc

SEQ ID NO: 1302 - RNA, 19 nt, Artificial Sequence
  source: /note="Description of Artificial Sequence: Synthetic oligonucleotide"
uggagcaucaguuuugaca

SEQ ID NO: 1303 - RNA, 19 nt, Artificial Sequence
  source: /note="Description of Artificial Sequence: Synthetic oligonucleotide"
cuggaagaucuggagcauc

SEQ ID NO: 1304 - RNA, 19 nt, Artificial Sequence
  source: /note="Description of Artificial Sequence: Synthetic oligonucleotide"
uuuucuucuggaagaucug

SEQ ID NO: 1305 - RNA, 19 nt, Artificial Sequence
  source: /note="Description of Artificial Sequence: Synthetic oligonucleotide"
uucccuggccugauuuucu

SEQ ID NO: 1306 - RNA, 19 nt, Artificial Sequence
  source: /note="Description of Artificial Sequence: Synthetic oligonucleotide"
ucgguaaccuucccuggcc

SEQ ID NO: 1307 - RNA, 19 nt, Artificial Sequence
  source: /note="Description of Artificial Sequence: Synthetic oligonucleotide"
uaugcuauugcucgguaac

SEQ ID NO: 1308 - RNA, 19 nt, Artificial Sequence
  source: /note="Description of Artificial Sequence: Synthetic oligonucleotide"
ugagagaugaguaugcuau

SEQ ID NO: 1309 - RNA, 19 nt, Artificial Sequence
  source: /note="Description of Artificial Sequence: Synthetic oligonucleotide"
uuuggcugagagaugagua

SEQ ID NO: 1310 - RNA, 19 nt, Artificial Sequence
  source: /note="Description of Artificial Sequence: Synthetic oligonucleotide"
auauaaagguaacuuuggc

SEQ ID NO: 1311 - RNA, 19 nt, Artificial Sequence
  source: /note="Description of Artificial Sequence: Synthetic oligonucleotide"
aguccaaucaauauaaagg

SEQ ID NO: 1312 - RNA, 19 nt, Artificial Sequence
  source: /note="Description of Artificial Sequence: Synthetic oligonucleotide"
uaugguuaucaguccaauc

SEQ ID NO: 1313 - RNA, 19 nt, Artificial Sequence
  source: /note="Description of Artificial Sequence: Synthetic oligonucleotide"
aaagccuuaugguuaucag

SEQ ID NO: 1314 - RNA, 19 nt, Artificial Sequence
  source: /note="Description of Artificial Sequence: Synthetic oligonucleotide"
ucucccacuagcaaagccu

SEQ ID NO: 1315 - RNA, 19 nt, Artificial Sequence
  source: /note="Description of Artificial Sequence: Synthetic oligonucleotide"
uauucagauguucucccac

SEQ ID NO: 1316 - RNA, 19 nt, Artificial Sequence
  source: /note="Description of Artificial Sequence: Synthetic oligonucleotide"
uaacaauaauauucagaug

SEQ ID NO: 1317 - RNA, 19 nt, Artificial Sequence
  source: /note="Description of Artificial Sequence: Synthetic oligonucleotide"
uuuggggguaacaauaaua

SEQ ID NO: 1318 - RNA, 19 nt, Artificial Sequence
  source: /note="Description of Artificial Sequence: Synthetic oligonucleotide"
caauauaugggcuuuuggg

SEQ ID NO: 1319 - RNA, 19 nt, Artificial Sequence
  source: /note="Description of Artificial Sequence: Synthetic oligonucleotide"
ucaauauaugggcuuuugg

SEQ ID NO: 1320 - RNA, 19 nt, Artificial Sequence
  source: /note="Description of Artificial Sequence: Synthetic oligonucleotide"
gucaauauaugggcuuuug

SEQ ID NO: 1321 - RNA, 19 nt, Artificial Sequence
  source: /note="Description of Artificial Sequence: Synthetic oligonucleotide"
ugucaauauaugggcuuuu

SEQ ID NO: 1322 - RNA, 19 nt, Artificial Sequence
  source: /note="Description of Artificial Sequence: Synthetic oligonucleotide"
uugucaauauaugggcuuu

SEQ ID NO: 1323 - RNA, 19 nt, Artificial Sequence
  source: /note="Description of Artificial Sequence: Synthetic oligonucleotide"
uuugucaauauaugggcuu

SEQ ID NO: 1324 - RNA, 19 nt, Artificial Sequence
  source: /note="Description of Artificial Sequence: Synthetic oligonucleotide"
uuuugucaauauaugggcu

SEQ ID NO: 1325 - RNA, 19 nt, Artificial Sequence
  source: /note="Description of Artificial Sequence: Synthetic oligonucleotide"
auuuugucaauauaugggc

SEQ ID NO: 1326 - RNA, 19 nt, Artificial Sequence
  source: /note="Description of Artificial Sequence: Synthetic oligonucleotide"
uauuuugucaauauauggg

SEQ ID NO: 1327 - RNA, 19 nt, Artificial Sequence
  source: /note="Description of Artificial Sequence: Synthetic oligonucleotide"
uuauuuugucaauauaugg

SEQ ID NO: 1328 - RNA, 19 nt, Artificial Sequence
  source: /note="Description of Artificial Sequence: Synthetic oligonucleotide"
guuauuuugucaauauaug

SEQ ID NO: 1329 - RNA, 19 nt, Artificial Sequence
  source: /note="Description of Artificial Sequence: Synthetic oligonucleotide"
aguuauuuugucaauauau

SEQ ID NO: 1330 - RNA, 19 nt, Artificial Sequence
  source: /note="Description of Artificial Sequence: Synthetic oligonucleotide"
gaguuauuuugucaauaua

SEQ ID NO: 1331 - RNA, 19 nt, Artificial Sequence
  source: /note="Description of Artificial Sequence: Synthetic oligonucleotide"
ugaguuauuuugucaauau

SEQ ID NO: 1332 - RNA, 19 nt, Artificial Sequence
  source: /note="Description of Artificial Sequence: Synthetic oligonucleotide"
gugaguuauuuugucaaua

SEQ ID NO: 1333 - RNA, 19 nt, Artificial Sequence
  source: /note="Description of Artificial Sequence: Synthetic oligonucleotide"
agugaguuauuuugucaau

SEQ ID NO: 1334 - RNA, 19 nt, Artificial Sequence
  source: /note="Description of Artificial Sequence: Synthetic oligonucleotide"
uagugaguuauuuugucaa

SEQ ID NO: 1335 - RNA, 19 nt, Artificial Sequence
  source: /note="Description of Artificial Sequence: Synthetic oligonucleotide"
auagugaguuauuuuguca

SEQ ID NO: 1336 - RNA, 19 nt, Artificial Sequence
  source: /note="Description of Artificial Sequence: Synthetic oligonucleotide"
uauagugaguuauuuuguc

SEQ ID NO: 1337 - RNA, 19 nt, Artificial Sequence
  source: /note="Description of Artificial Sequence: Synthetic oligonucleotide"
aauuauagugaguuauuuu

SEQ ID NO: 1338 - RNA, 19 nt, Artificial Sequence
  source: /note="Description of Artificial Sequence: Synthetic oligonucleotide"
uaauuauagugaguuauuu

SEQ ID NO: 1339 - RNA, 19 nt, Artificial Sequence
  source: /note="Description of Artificial Sequence: Synthetic oligonucleotide"
guaauuauagugaguuauu

SEQ ID NO: 1340 - RNA, 19 nt, Artificial Sequence
  source: /note="Description of Artificial Sequence: Synthetic oligonucleotide"
aguaauuauagugaguuau

SEQ ID NO: 1341 - RNA, 19 nt, Artificial Sequence
  source: /note="Description of Artificial Sequence: Synthetic oligonucleotide"
caaguaauuauagugaguu

SEQ ID NO: 1342 - RNA, 19 nt, Artificial Sequence
  source: /note="Description of Artificial Sequence: Synthetic oligonucleotide"
ucaaguaauuauagugagu

SEQ ID NO: 1343 - RNA, 19 nt, Artificial Sequence
  source: /note="Description of Artificial Sequence: Synthetic oligonucleotide"
aucaaguaauuauagugag

SEQ ID NO: 1344 - RNA, 19 nt, Artificial Sequence
  source: /note="Description of Artificial Sequence: Synthetic oligonucleotide"
aaucaaguaauuauaguga

SEQ ID NO: 1345 - RNA, 19 nt, Artificial Sequence
  source: /note="Description of Artificial Sequence: Synthetic oligonucleotide"
aaaaucaaguaauuauagu

SEQ ID NO: 1346 - RNA, 19 nt, Artificial Sequence
  source: /note="Description of Artificial Sequence: Synthetic oligonucleotide"
uaaaaucaaguaauuauag

SEQ ID NO: 1347 - RNA, 19 nt, Artificial Sequence
  source: /note="Description of Artificial Sequence: Synthetic oligonucleotide"
auaaaaucaaguaauuaua

SEQ ID NO: 1348 - RNA, 19 nt, Artificial Sequence
  source: /note="Description of Artificial Sequence: Synthetic oligonucleotide"
gauaaaaucaaguaauuau

SEQ ID NO: 1349 - RNA, 19 nt, Artificial Sequence
  source: /note="Description of Artificial Sequence: Synthetic oligonucleotide"
ggauaaaaucaaguaauua

SEQ ID NO: 1350 - RNA, 19 nt, Artificial Sequence
  source: /note="Description of Artificial Sequence: Synthetic oligonucleotide"
uggauaaaaucaaguaauu

SEQ ID NO: 1351 - RNA, 19 nt, Artificial Sequence
  source: /note="Description of Artificial Sequence: Synthetic oligonucleotide"
uuggauaaaaucaaguaau

SEQ ID NO: 1352 - RNA, 19 nt, Artificial Sequence
  source: /note="Description of Artificial Sequence: Synthetic oligonucleotide"
uaauuuugcccuuggauaa

SEQ ID NO: 1353 - RNA, 19 nt, Artificial Sequence
  source: /note="Description of Artificial Sequence: Synthetic oligonucleotide"
ccaaaguggauaauuuugc

SEQ ID NO: 1354 - RNA, 19 nt, Artificial Sequence
  source: /note="Description of Artificial Sequence: Synthetic oligonucleotide"
ucucccucgugccaaagug

SEQ ID NO: 1355 - RNA, 19 nt, Artificial Sequence
  source: /note="Description of Artificial Sequence: Synthetic oligonucleotide"
ucugaaaauuucucccucg

SEQ ID NO: 1356 - RNA, 19 nt, Artificial Sequence
  source: /note="Description of Artificial Sequence: Synthetic oligonucleotide"
auaagaugcaucugaaaau

SEQ ID NO: 1357 - RNA, 19 nt, Artificial Sequence
  source: /note="Description of Artificial Sequence: Synthetic oligonucleotide"
uuauacuuugauaagaugc

SEQ ID NO: 1358 - RNA, 19 nt, Artificial Sequence
  source: /note="Description of Artificial Sequence: Synthetic oligonucleotide"
cuggaauguuuauacuuug

SEQ ID NO: 1359 - RNA, 19 nt, Artificial Sequence
  source: /note="Description of Artificial Sequence: Synthetic oligonucleotide"
uguucuguguuacuggaau

SEQ ID NO: 1360 - RNA, 19 nt, Artificial Sequence
  source: /note="Description of Artificial Sequence: Synthetic oligonucleotide"
gaaggaaccauguucugug

SEQ ID NO: 1361 - RNA, 19 nt, Artificial Sequence
  source: /note="Description of Artificial Sequence: Synthetic oligonucleotide"
aagucgggaugaaggaacc

SEQ ID NO: 1362 - RNA, 19 nt, Artificial Sequence
  source: /note="Description of Artificial Sequence: Synthetic oligonucleotide"
uaauagaccagaagucggg

SEQ ID NO: 1363 - RNA, 19 nt, Artificial Sequence
  source: /note="Description of Artificial Sequence: Synthetic oligonucleotide"
ugugacgauguaauagacc

SEQ ID NO: 1364 - RNA, 19 nt, Artificial Sequence
  source: /note="Description of Artificial Sequence: Synthetic oligonucleotide"
ucuguucuccugugacgau

SEQ ID NO: 1365 - RNA, 19 nt, Artificial Sequence
  source: /note="Description of Artificial Sequence: Synthetic oligonucleotide"
ucugcugucuguucuccug

SEQ ID NO: 1366 - RNA, 19 nt, Artificial Sequence
  source: /note="Description of Artificial Sequence: Synthetic oligonucleotide"
ucagacacuaauucugcug

SEQ ID NO: 1367 - RNA, 19 nt, Artificial Sequence
  source: /note="Description of Artificial Sequence: Synthetic oligonucleotide"
accagacugaaucagacac

SEQ ID NO: 1368 - RNA, 19 nt, Artificial Sequence
  source: /note="Description of Artificial Sequence: Synthetic oligonucleotide"
ucaauauuuaaccagacug

SEQ ID NO: 1369 - RNA, 19 nt, Artificial Sequence
  source: /note="Description of Artificial Sequence: Synthetic oligonucleotide"
uuuuucuucaauauuuaac

SEQ ID NO: 1370 - RNA, 19 nt, Artificial Sequence
  source: /note="Description of Artificial Sequence: Synthetic oligonucleotide"
cugguugccacauuuuucu

SEQ ID NO: 1371 - RNA, 19 nt, Artificial Sequence
  source: /note="Description of Artificial Sequence: Synthetic oligonucleotide"
ugaaccuggagcugguugc

SEQ ID NO: 1372 - RNA, 19 nt, Artificial Sequence
  source: /note="Description of Artificial Sequence: Synthetic oligonucleotide"
agacagaugaaccuggagc

SEQ ID NO: 1373 - RNA, 19 nt, Artificial Sequence
  source: /note="Description of Artificial Sequence: Synthetic oligonucleotide"
ucugcaucaggagacagau

SEQ ID NO: 1374 - RNA, 19 nt, Artificial Sequence
  source: /note="Description of Artificial Sequence: Synthetic oligonucleotide"
gagaauaugcaucugcauc

SEQ ID NO: 1375 - RNA, 19 nt, Artificial Sequence
  source: /note="Description of Artificial Sequence: Synthetic oligonucleotide"
uuuggccuggagaauaugc

SEQ ID NO: 1376 - RNA, 19 nt, Artificial Sequence
  source: /note="Description of Artificial Sequence: Synthetic oligonucleotide"
aagagacacaguuuggccu

SEQ ID NO: 1377 - RNA, 19 nt, Artificial Sequence
  source: /note="Description of Artificial Sequence: Synthetic oligonucleotide"
uugccauauuaagagacac

SEQ ID NO: 1378 - RNA, 19 nt, Artificial Sequence
  source: /note="Description of Artificial Sequence: Synthetic oligonucleotide"
auuccaguugccauauuaa

SEQ ID NO: 1379 - RNA, 19 nt, Artificial Sequence
  source: /note="Description of Artificial Sequence: Synthetic oligonucleotide"
ccaggaauccauuccaguu

SEQ ID NO: 1380 - RNA, 19 nt, Artificial Sequence
  source: /note="Description of Artificial Sequence: Synthetic oligonucleotide"
ugcuaaugccacccaggaa

SEQ ID NO: 1381 - RNA, 19 nt, Artificial Sequence
  source: /note="Description of Artificial Sequence: Synthetic oligonucleotide"
guccacugcugcuaaugcc

SEQ ID NO: 1382 - RNA, 19 nt, Artificial Sequence
  source: /note="Description of Artificial Sequence: Synthetic oligonucleotide"
auacacagcacuguccacu

SEQ ID NO: 1383 - RNA, 19 nt, Artificial Sequence
  source: /note="Description of Artificial Sequence: Synthetic oligonucleotide"
uuuggacuccauacacagc

SEQ ID NO: 1384 - RNA, 19 nt, Artificial Sequence
  source: /note="Description of Artificial Sequence: Synthetic oligonucleotide"
uuuggcuccucuuuggacu

SEQ ID NO: 1385 - RNA, 19 nt, Artificial Sequence
  source: /note="Description of Artificial Sequence: Synthetic oligonucleotide"
agggcuuuuuggcuccucu

SEQ ID NO: 1386 - RNA, 19 nt, Artificial Sequence
  source: /note="Description of Artificial Sequence: Synthetic oligonucleotide"
aauacucuuuccaagggcu

SEQ ID NO: 1387 - RNA, 19 nt, Artificial Sequence
  source: /note="Description of Artificial Sequence: Synthetic oligonucleotide"
uaagaauugaaauacucuu

SEQ ID NO: 1388 - RNA, 19 nt, Artificial Sequence
  source: /note="Description of Artificial Sequence: Synthetic oligonucleotide"
ucuucucuaagaauugaaa

SEQ ID NO: 1389 - RNA, 19 nt, Artificial Sequence
  source: /note="Description of Artificial Sequence: Synthetic oligonucleotide"
agcccagaucacucuucuc

SEQ ID NO: 1390 - RNA, 19 nt, Artificial Sequence
  source: /note="Description of Artificial Sequence: Synthetic oligonucleotide"
ugccccacagcccagauca

SEQ ID NO: 1391 - RNA, 19 nt, Artificial Sequence
  source: /note="Description of Artificial Sequence: Synthetic oligonucleotide"
ugaggccaccaccugcccc

SEQ ID NO: 1392 - RNA, 19 nt, Artificial Sequence
  source: /note="Description of Artificial Sequence: Synthetic oligonucleotide"
uuggcauuguugaggccac

SEQ ID NO: 1393 - RNA, 19 nt, Artificial Sequence
  source: /note="Description of Artificial Sequence: Synthetic oligonucleotide"
gaacacauuggcauuguug

SEQ ID NO: 1394 - RNA, 19 nt, Artificial Sequence
  source: /note="Description of Artificial Sequence: Synthetic oligonucleotide"
agcuagguggaacacauug

SEQ ID NO: 1395 - RNA, 19 nt, Artificial Sequence
  source: /note="Description of Artificial Sequence: Synthetic oligonucleotide"
agguaaguccagcuaggug

SEQ ID NO: 1396 - RNA, 19 nt, Artificial Sequence
  source: /note="Description of Artificial Sequence: Synthetic oligonucleotide"
uuagugaggaagguaaguc

SEQ ID NO: 1397 - RNA, 19 nt, Artificial Sequence
  source: /note="Description of Artificial Sequence: Synthetic oligonucleotide"
ucugcauuugcauuaguga

SEQ ID NO: 1398 - RNA, 19 nt, Artificial Sequence
  source: /note="Description of Artificial Sequence: Synthetic oligonucleotide"
uugggagucaucugcauuu

SEQ ID NO: 1399 - RNA, 19 nt, Artificial Sequence
  source: /note="Description of Artificial Sequence: Synthetic oligonucleotide"
uucaucauuuucuugggag

SEQ ID NO: 1400 - RNA, 19 nt, Artificial Sequence
  source: /note="Description of Artificial Sequence: Synthetic oligonucleotide"
ugagaauuucuuuacaagg

SEQ ID NO: 1401 - RNA, 19 nt, Artificial Sequence
  source: /note="Description of Artificial Sequence: Synthetic oligonucleotide"
ucuucuuggccugagaauu

SEQ ID NO: 1402 - RNA, 19 nt, Artificial Sequence
  source: /note="Description of Artificial Sequence: Synthetic oligonucleotide"
uuugcagcguucuucuugg

SEQ ID NO: 1403 - RNA, 19 nt, Artificial Sequence
  source: /note="Description of Artificial Sequence: Synthetic oligonucleotide"
ucuaucuucuuuugcagcg

SEQ ID NO: 1404 - RNA, 19 nt, Artificial Sequence
  source: /note="Description of Artificial Sequence: Synthetic oligonucleotide"
uauuucuucuaucuucuuu

SEQ ID NO: 1405 - RNA, 19 nt, Artificial Sequence
  source: /note="Description of Artificial Sequence: Synthetic oligonucleotide"
auauuuagcagcuauuucu

SEQ ID NO: 1406 - RNA, 19 nt, Artificial Sequence
  source: /note="Description of Artificial Sequence: Synthetic oligonucleotide"
aauguuuauauuuagcagc

SEQ ID NO: 1407 - RNA, 19 nt, Artificial Sequence
  source: /note="Description of Artificial Sequence: Synthetic oligonucleotide"
uuucuucacuacugaaugu

SEQ ID NO: 1408 - RNA, 19 nt, Artificial Sequence
  source: /note="Description of Artificial Sequence: Synthetic oligonucleotide"
aacaacauuucuucacuac

SEQ ID NO: 1409 - RNA, 19 nt, Artificial Sequence
  source: /note="Description of Artificial Sequence: Synthetic oligonucleotide"
cuccaucguaacaacauuu

SEQ ID NO: 1410 - RNA, 19 nt, Artificial Sequence
  source: /note="Description of Artificial Sequence: Synthetic oligonucleotide"
auuaacgcaggcuccaucg

SEQ ID NO: 1411 - RNA, 19 nt, Artificial Sequence
  source: /note="Description of Artificial Sequence: Synthetic oligonucleotide"
gguuucaucauuauuaacg

SEQ ID NO: 1412 - RNA, 19 nt, Artificial Sequence
  source: /note="Description of Artificial Sequence: Synthetic oligonucleotide"
ugcucacagguuucaucau

SEQ ID NO: 1413 - RNA, 19 nt, Artificial Sequence
  source: /note="Description of Artificial Sequence: Synthetic oligonucleotide"
ugcagcucgcugcucacag

SEQ ID NO: 1414 - RNA, 19 nt, Artificial Sequence
  source: /note="Description of Artificial Sequence: Synthetic oligonucleotide"
aacuaauccgugcagcucg

SEQ ID NO: 1415 - RNA, 19 nt, Artificial Sequence
  source: /note="Description of Artificial Sequence: Synthetic oligonucleotide"
cuuggcccuaaacuaaucc

SEQ ID NO: 1416 - RNA, 19 nt, Artificial Sequence
  source: /note="Description of Artificial Sequence: Synthetic oligonucleotide"
cuuugaugcaucuuggccc

SEQ ID NO: 1417 - RNA, 19 nt, Artificial Sequence
  source: /note="Description of Artificial Sequence: Synthetic oligonucleotide"
uucagugaaagcuuugaug

SEQ ID NO: 1418 - RNA, 19 nt, Artificial Sequence
  source: /note="Description of Artificial Sequence: Synthetic oligonucleotide"
cacaacauucagugaaagc

SEQ ID NO: 1419 - RNA, 19 nt, Artificial Sequence
  source: /note="Description of Artificial Sequence: Synthetic oligonucleotide"
cuugcgacgacacaacauu

SEQ ID NO: 1420 - RNA, 19 nt, Artificial Sequence
  source: /note="Description of Artificial Sequence: Synthetic oligonucleotide"
acggagcuggcuugcgacg

SEQ ID NO: 1421 - RNA, 19 nt, Artificial Sequence
  source: /note="Description of Artificial Sequence: Synthetic oligonucleotide"
agagauauuagcacggagc

SEQ ID NO: 1422 - RNA, 19 nt, Artificial Sequence
  source: /note="Description of Artificial Sequence: Synthetic oligonucleotide"
ucuuuaugagagauauuag

SEQ ID NO: 1423 - RNA, 19 nt, Artificial Sequence
  source: /note="Description of Artificial Sequence: Synthetic oligonucleotide"
uucccaauugcaugucuuu

SEQ ID NO: 1424 - RNA, 19 nt, Artificial Sequence
  source: /note="Description of Artificial Sequence: Synthetic oligonucleotide"
uguguagccuucccaauug

SEQ ID NO: 1425 - RNA, 19 nt, Artificial Sequence
  source: /note="Description of Artificial Sequence: Synthetic oligonucleotide"
cagggucuucauguguagc

SEQ ID NO: 1426 - RNA, 19 nt, Artificial Sequence
  source: /note="Description of Artificial Sequence: Synthetic oligonucleotide"
ugguaacagggucuucaug

SEQ ID NO: 1427 - RNA, 19 nt, Artificial Sequence
  source: /note="Description of Artificial Sequence: Synthetic oligonucleotide"
ucuggcuugcuuacuggua

SEQ ID NO: 1428 - RNA, 19 nt, Artificial Sequence
  source: /note="Description of Artificial Sequence: Synthetic oligonucleotide"
uccgaauuucuggcuugcu

SEQ ID NO: 1429 - RNA, 19 nt, Artificial Sequence
  source: /note="Description of Artificial Sequence: Synthetic oligonucleotide"
aaaauaacuccgaauuucu

SEQ ID NO: 1430 - RNA, 19 nt, Artificial Sequence
  source: /note="Description of Artificial Sequence: Synthetic oligonucleotide"
agcuuucuggaaaauaacu

SEQ ID NO: 1431 - RNA, 19 nt, Artificial Sequence
  source: /note="Description of Artificial Sequence: Synthetic oligonucleotide"
ucccacaaccagcuuucug

SEQ ID NO: 1432 - RNA, 19 nt, Artificial Sequence
  source: /note="Description of Artificial Sequence: Synthetic oligonucleotide"
aacaagaugaacuucccac

SEQ ID NO: 1433 - RNA, 19 nt, Artificial Sequence
  source: /note="Description of Artificial Sequence: Synthetic oligonucleotide"
ucuucugggaacaagauga

SEQ ID NO: 1434 - RNA, 19 nt, Artificial Sequence
  source: /note="Description of Artificial Sequence: Synthetic oligonucleotide"
ugcaacuguuuucuucugg

SEQ ID NO: 1435 - RNA, 19 nt, Artificial Sequence
  source: /note="Description of Artificial Sequence: Synthetic oligonucleotide"
guagggcaaacugcaacug

SEQ ID NO: 1436 - RNA, 19 nt, Artificial Sequence
  source: /note="Description of Artificial Sequence: Synthetic oligonucleotide"
aaucagguagggcaaacug

SEQ ID NO: 1437 - RNA, 19 nt, Artificial Sequence
  source: /note="Description of Artificial Sequence: Synthetic oligonucleotide"
aggugguuagagaaucagg

SEQ ID NO: 1438 - RNA, 19 nt, Artificial Sequence
  source: /note="Description of Artificial Sequence: Synthetic oligonucleotide"
cuugaauuucccagguggu

SEQ ID NO: 1439 - RNA, 19 nt, Artificial Sequence
  source: /note="Description of Artificial Sequence: Synthetic oligonucleotide"
ugccaacgccuugaauuuc

SEQ ID NO: 1440 - RNA, 19 nt, Artificial Sequence
  source: /note="Description of Artificial Sequence: Synthetic oligonucleotide"
aguguuugaaaugccaacg

SEQ ID NO: 1441 - RNA, 19 nt, Artificial Sequence
  source: /note="Description of Artificial Sequence: Synthetic oligonucleotide"
uauaccaguguuugaaaug

SEQ ID NO: 1442 - RNA, 19 nt, Artificial Sequence
  source: /note="Description of Artificial Sequence: Synthetic oligonucleotide"
guaucagcaacacauauac

SEQ ID NO: 1443 - RNA, 19 nt, Artificial Sequence
  source: /note="Description of Artificial Sequence: Synthetic oligonucleotide"
ugccuugacaguaucagca

SEQ ID NO: 1444 - RNA, 19 nt, Artificial Sequence
  source: /note="Description of Artificial Sequence: Synthetic oligonucleotide"
aacaccuuugccuugacag

SEQ ID NO: 1445 - RNA, 19 nt, Artificial Sequence
  source: /note="Description of Artificial Sequence: Synthetic oligonucleotide"
aagacaucuuugaacaccu

SEQ ID NO: 1446 - RNA, 19 nt, Artificial Sequence
  source: /note="Description of Artificial Sequence: Synthetic oligonucleotide"
uuccaggaagacaucuuug

SEQ ID NO: 1447 - RNA, 19 nt, Artificial Sequence
  source: /note="Description of Artificial Sequence: Synthetic oligonucleotide"
uauauucauuuccaggaag

SEQ ID NO: 1448 - RNA, 19 nt, Artificial Sequence
  source: /note="Description of Artificial Sequence: Synthetic oligonucleotide"
aacagaauaugguauauuc

SEQ ID NO: 1449 - RNA, 19 nt, Artificial Sequence
  source: /note="Description of Artificial Sequence: Synthetic oligonucleotide"
uccucguacaacagaauau

SEQ ID NO: 1450 - RNA, 19 nt, Artificial Sequence
  source: /note="Description of Artificial Sequence: Synthetic oligonucleotide"
auuggaucuguucuccucg

SEQ ID NO: 1451 - RNA, 19 nt, Artificial Sequence
  source: /note="Description of Artificial Sequence: Synthetic oligonucleotide"
cuuucaauuggaucuguuc

SEQ ID NO: 1452 - RNA, 19 nt, Artificial Sequence
  source: /note="Description of Artificial Sequence: Synthetic oligonucleotide"
guuguaaacaguuccuuuc

SEQ ID NO: 1453 - RNA, 19 nt, Artificial Sequence
  source: /note="Description of Artificial Sequence: Synthetic oligonucleotide"
uccuauaguuguaaacagu

SEQ ID NO: 1454 - RNA, 19 nt, Artificial Sequence
  source: /note="Description of Artificial Sequence: Synthetic oligonucleotide"
ucccagaaguccuauaguu

SEQ ID NO: 1455 - RNA, 19 nt, Artificial Sequence
  source: /note="Description of Artificial Sequence: Synthetic oligonucleotide"
aacacagaacugcauccca

SEQ ID NO: 1456 - RNA, 19 nt, Artificial Sequence
  source: /note="Description of Artificial Sequence: Synthetic oligonucleotide"
agacauuuuaacacagaac

SEQ ID NO: 1457 - RNA, 19 nt, Artificial Sequence
  source: /note="Description of Artificial Sequence: Synthetic oligonucleotide"
uccacagcagacauuuuaa

SEQ ID NO: 1458 - RNA, 19 nt, Artificial Sequence
  source: /note="Description of Artificial Sequence: Synthetic oligonucleotide"
gugcagauucccuccacag

SEQ ID NO: 1459 - RNA, 19 nt, Artificial Sequence
  source: /note="Description of Artificial Sequence: Synthetic oligonucleotide"
uuuccgaagugcagauucc

SEQ ID NO: 1460 - RNA, 19 nt, Artificial Sequence
  source: /note="Description of Artificial Sequence: Synthetic oligonucleotide"
ucaaugacugggcuuuccg

SEQ ID NO: 1461 - RNA, 19 nt, Artificial Sequence
  source: /note="Description of Artificial Sequence: Synthetic oligonucleotide"
ccugaugaucaaugacugg

SEQ ID NO: 1462 - RNA, 19 nt, Artificial Sequence
  source: /note="Description of Artificial Sequence: Synthetic oligonucleotide"
aggacuuugugcccugaug

SEQ ID NO: 1463 - RNA, 19 nt, Artificial Sequence
  source: /note="Description of Artificial Sequence: Synthetic oligonucleotide"
auuuggaggacuuugugcc

SEQ ID NO: 1464 - RNA, 19 nt, Artificial Sequence
  source: /note="Description of Artificial Sequence: Synthetic oligonucleotide"
uuucuggcgcacacauuug

SEQ ID NO: 1465 - RNA, 19 nt, Artificial Sequence
  source: /note="Description of Artificial Sequence: Synthetic oligonucleotide"
gcccucuacuuucuggcgc

SEQ ID NO: 1466 - RNA, 19 nt, Artificial Sequence
  source: /note="Description of Artificial Sequence: Synthetic oligonucleotide"
acuggaggagcccucuacu

SEQ ID NO: 1467 - RNA, 19 nt, Artificial Sequence
  source: /note="Description of Artificial Sequence: Synthetic oligonucleotide"
gucaccaagugacuggagg

SEQ ID NO: 1468 - RNA, 19 nt, Artificial Sequence
  source: /note="Description of Artificial Sequence: Synthetic oligonucleotide"
agugaaugucaccaaguga

SEQ ID NO: 1469 - RNA, 19 nt, Artificial Sequence
  source: /note="Description of Artificial Sequence: Synthetic oligonucleotide"
agaggaagcacagugaaug

SEQ ID NO: 1470 - RNA, 19 nt, Artificial Sequence
  source: /note="Description of Artificial Sequence: Synthetic oligonucleotide"
guugugaaggccaauuucc

SEQ ID NO: 1471 - RNA, 19 nt, Artificial Sequence
  source: /note="Description of Artificial Sequence: Synthetic oligonucleotide"
aaaaauugauguugugaag

SEQ ID NO: 1472 - RNA, 19 nt, Artificial Sequence
  source: /note="Description of Artificial Sequence: Synthetic oligonucleotide"
aagucuccagugaaaaauu

SEQ ID NO: 1473 - RNA, 19 nt, Artificial Sequence
  source: /note="Description of Artificial Sequence: Synthetic oligonucleotide"
uuccaaaccaagucuccag

SEQ ID NO: 1474 - RNA, 19 nt, Artificial Sequence
  source: /note="Description of Artificial Sequence: Synthetic oligonucleotide"
aagauuucuuuuccaaacc

SEQ ID NO: 1475 - RNA, 19 nt, Artificial Sequence
  source: /note="Description of Artificial Sequence: Synthetic oligonucleotide"
uaauguuuuuacuaagauu

SEQ ID NO: 1476 - RNA, 19 nt, Artificial Sequence
  source: /note="Description of Artificial Sequence: Synthetic oligonucleotide"
caccacucguaauguuuuu

SEQ ID NO: 1477 - RNA, 19 nt, Artificial Sequence
  source: /note="Description of Artificial Sequence: Synthetic oligonucleotide"
acaccuucuggcaccacuc

SEQ ID NO: 1478 - RNA, 19 nt, Artificial Sequence
  source: /note="Description of Artificial Sequence: Synthetic oligonucleotide"
uucccuuuugacaccuucu

SEQ ID NO: 1479 - RNA, 19 nt, Artificial Sequence
  source: /note="Description of Artificial Sequence: Synthetic oligonucleotide"
auagcuuucccuuuugaca

SEQ ID NO: 1480 - RNA, 19 nt, Artificial Sequence
  source: /note="Description of Artificial Sequence: Synthetic oligonucleotide"
aaaguaacaccagaauagc

SEQ ID NO: 1481 - RNA, 19 nt, Artificial Sequence
  source: /note="Description of Artificial Sequence: Synthetic oligonucleotide"
cuaggauccaaaguaacac

SEQ ID NO: 1482 - RNA, 19 nt, Artificial Sequence
  source: /note="Description of Artificial Sequence: Synthetic oligonucleotide"
auaaauaccccuaggaucc

SEQ ID NO: 1483 - RNA, 19 nt, Artificial Sequence
  source: /note="Description of Artificial Sequence: Synthetic oligonucleotide"
uaaugguaccauaaauacc

SEQ ID NO: 1484 - RNA, 19 nt, Artificial Sequence
  source: /note="Description of Artificial Sequence: Synthetic oligonucleotide"
uuucgucugcuaaugguac

SEQ ID NO: 1485 - RNA, 19 nt, Artificial Sequence
  source: /note="Description of Artificial Sequence: Synthetic oligonucleotide"
ugggaacuccuuucgucug

SEQ ID NO: 1486 - RNA, 19 nt, Artificial Sequence
  source: /note="Description of Artificial Sequence: Synthetic oligonucleotide"
auccuguaugggaacuccu

SEQ ID NO: 1487 - RNA, 19 nt, Artificial Sequence
  source: /note="Description of Artificial Sequence: Synthetic oligonucleotide"
ucuaaggguauccuguaug

SEQ ID NO: 1488 - RNA, 19 nt, Artificial Sequence
  source: /note="Description of Artificial Sequence: Synthetic oligonucleotide"
uuuggggaccaaaucuaag

SEQ ID NO: 1489 - RNA, 19 nt, Artificial Sequence
  source: /note="Description of Artificial Sequence: Synthetic oligonucleotide"
uugauuucuguuuugggga

SEQ ID NO: 1490 - RNA, 19 nt, Artificial Sequence
  source: /note="Description of Artificial Sequence: Synthetic oligonucleotide"
aaauccuuuugauuucugu

SEQ ID NO: 1491 - RNA, 19 nt, Artificial Sequence
  source: /note="Description of Artificial Sequence: Synthetic oligonucleotide"
uuuacacucaaaauccuuu

SEQ ID NO: 1492 - RNA, 19 nt, Artificial Sequence
  source: /note="Description of Artificial Sequence: Synthetic oligonucleotide"
caagcaguccuuuuacacu

SEQ ID NO: 1493 - RNA, 19 nt, Artificial Sequence
  source: /note="Description of Artificial Sequence: Synthetic oligonucleotide"
ucaccuacaagcaguccuu

SEQ ID NO: 1494 - RNA, 19 nt, Artificial Sequence
  source: /note="Description of Artificial Sequence: Synthetic oligonucleotide"
cagacaagaucucaccuac

SEQ ID NO: 1495 - RNA, 19 nt, Artificial Sequence
  source: /note="Description of Artificial Sequence: Synthetic oligonucleotide"
uuagaacugcagacaagau

SEQ ID NO: 1496 - RNA, 19 nt, Artificial Sequence
  source: /note="Description of Artificial Sequence: Synthetic oligonucleotide"
ugccuuccugacuuagaac

SEQ ID NO: 1497 - RNA, 19 nt, Artificial Sequence
  source: /note="Description of Artificial Sequence: Synthetic oligonucleotide"
uuaggauauugaugccuuc

SEQ ID NO: 1498 - RNA, 19 nt, Artificial Sequence
  source: /note="Description of Artificial Sequence: Synthetic oligonucleotide"
agguggguuaggauauuga

SEQ ID NO: 1499 - RNA, 19 nt, Artificial Sequence
  source: /note="Description of Artificial Sequence: Synthetic oligonucleotide"
acucccuuuggggaggugg

SEQ ID NO: 1500 - RNA, 19 nt, Artificial Sequence
  source: /note="Description of Artificial Sequence: Synthetic oligonucleotide"
cucugcacucccuuugggg

SEQ ID NO: 1501 - RNA, 19 nt, Artificial Sequence
  source: /note="Description of Artificial Sequence: Synthetic oligonucleotide"
aucagcuccgccucugcac

SEQ ID NO: 1502 - RNA, 19 nt, Artificial Sequence
  source: /note="Description of Artificial Sequence: Synthetic oligonucleotide"
gacaacgcucaucagcucc

SEQ ID NO: 1503 - RNA, 19 nt, Artificial Sequence
  source: /note="Description of Artificial Sequence: Synthetic oligonucleotide"
auagaauacugggacaacg

SEQ ID NO: 1504 - RNA, 19 nt, Artificial Sequence
  source: /note="Description of Artificial Sequence: Synthetic oligonucleotide"
gaaaaacauagaauacugg

SEQ ID NO: 1505 - RNA, 19 nt, Artificial Sequence
  source: /note="Description of Artificial Sequence: Synthetic oligonucleotide"
uuuccagguagugaaaaac

SEQ ID NO: 1506 - RNA, 19 nt, Artificial Sequence
  source: /note="Description of Artificial Sequence: Synthetic oligonucleotide"
augauuuccuguuuccagg

SEQ ID NO: 1507 - RNA, 19 nt, Artificial Sequence
  source: /note="Description of Artificial Sequence: Synthetic oligonucleotide"
ucagaaugaaaaauguucc

SEQ ID NO: 1508 - RNA, 19 nt, Artificial Sequence
  source: /note="Description of Artificial Sequence: Synthetic oligonucleotide"
caauuaaugggucagaaug

SEQ ID NO: 1509 - RNA, 19 nt, Artificial Sequence
  source: /note="Description of Artificial Sequence: Synthetic oligonucleotide"
ucugcuuuucaauuaaugg

SEQ ID NO: 1510 - RNA, 19 nt, Artificial Sequence
  source: /note="Description of Artificial Sequence: Synthetic oligonucleotide"
uuucuucaguuucugcuuu

SEQ ID NO: 1511 - RNA, 19 nt, Artificial Sequence
  source: /note="Description of Artificial Sequence: Synthetic oligonucleotide"
uuuaauuuuuucuucaguu

SEQ ID NO: 1512 - RNA, 19 nt, Artificial Sequence
  source: /note="Description of Artificial Sequence: Synthetic oligonucleotide"
ucccuucuuuuaauuuuuu

SEQ ID NO: 1513 - RNA, 19 nt, Artificial Sequence
  source: /note="Description of Artificial Sequence: Synthetic oligonucleotide"
cauaaugcucaacaucccu

SEQ ID NO: 1514 - RNA, 19 nt, Artificial Sequence
  source: /note="Description of Artificial Sequence: Synthetic oligonucleotide"
ucuguaggacauaaugcuc

SEQ ID NO: 1515 - RNA, 19 nt, Artificial Sequence
  source: /note="Description of Artificial Sequence: Synthetic oligonucleotide"
ucagcauuucuguaggaca

SEQ ID NO: 1516 - RNA, 19 nt, Artificial Sequence
  source: /note="Description of Artificial Sequence: Synthetic oligonucleotide"
uguaagaguagucagcauu

SEQ ID NO: 1517 - RNA, 19 nt, Artificial Sequence
  source: /note="Description of Artificial Sequence: Synthetic oligonucleotide"
uccacacacuguaagagua

SEQ ID NO: 1518 - RNA, 19 nt, Artificial Sequence
  source: /note="Description of Artificial Sequence: Synthetic oligonucleotide"
uuccacccuuccacacacu

SEQ ID NO: 1519 - RNA, 19 nt, Artificial Sequence
  source: /note="Description of Artificial Sequence: Synthetic oligonucleotide"
agugcuagcacuuccaccc

SEQ ID NO: 1520 - RNA, 19 nt, Artificial Sequence
  source: /note="Description of Artificial Sequence: Synthetic oligonucleotide"
cuguuaaccaagugcuagc

SEQ ID NO: 1521 - RNA, 19 nt, Artificial Sequence
  source: /note="Description of Artificial Sequence: Synthetic oligonucleotide"
aaagcaaaagcuguuaacc

SEQ ID NO: 1522 - RNA, 19 nt, Artificial Sequence
  source: /note="Description of Artificial Sequence: Synthetic oligonucleotide"
uccaaguacucuuaaagca

SEQ ID NO: 1523 - RNA, 19 nt, Artificial Sequence
  source: /note="Description of Artificial Sequence: Synthetic oligonucleotide"
uauuuacuuguccaaguac

SEQ ID NO: 1524 - RNA, 19 nt, Artificial Sequence
  source: /note="Description of Artificial Sequence: Synthetic oligonucleotide"
cuacguauuuauuuacuug

SEQ ID NO: 1525 - RNA, 19 nt, Artificial Sequence
  source: /note="Description of Artificial Sequence: Synthetic oligonucleotide"
uucugcucuacguauuuau

SEQ ID NO: 1526 - RNA, 19 nt, Artificial Sequence
  source: /note="Description of Artificial Sequence: Synthetic oligonucleotide"
uugaauuuugguucugcuc

SEQ ID NO: 1527 - RNA, 19 nt, Artificial Sequence
  source: /note="Description of Artificial Sequence: Synthetic oligonucleotide"
aagaauuacaaauugaauu

SEQ ID NO: 1528 - RNA, 19 nt, Artificial Sequence
  source: /note="Description of Artificial Sequence: Synthetic oligonucleotide"
agccacaauaaagaauuac

SEQ ID NO: 1529 - RNA, 19 nt, Artificial Sequence
  source: /note="Description of Artificial Sequence: Synthetic oligonucleotide"
auucucaacuagccacaau

SEQ ID NO: 1530 - RNA, 19 nt, Artificial Sequence
  source: /note="Description of Artificial Sequence: Synthetic oligonucleotide"
auugauaauucucaacuag

SEQ ID NO: 1531 - RNA, 19 nt, Artificial Sequence
  source: /note="Description of Artificial Sequence: Synthetic oligonucleotide"
uccauuaucuaauugauaa

SEQ ID NO: 1532 - RNA, 19 nt, Artificial Sequence
  source: /note="Description of Artificial Sequence: Synthetic oligonucleotide"
uuuccuugaaagauccauu

SEQ ID NO: 1533 - RNA, 19 nt, Artificial Sequence
  source: /note="Description of Artificial Sequence: Synthetic oligonucleotide"
ugugaauuuuccuugaaag

SEQ ID NO: 1534 - RNA, 19 nt, Artificial Sequence
  source: /note="Description of Artificial Sequence: Synthetic oligonucleotide"
uugguugauacugugaauu

SEQ ID NO: 1535 - RNA, 19 nt, Artificial Sequence
  source: /note="Description of Artificial Sequence: Synthetic oligonucleotide"
uaauuuuauugguugauac

SEQ ID NO: 1536 - RNA, 19 nt, Artificial Sequence
  source: /note="Description of Artificial Sequence: Synthetic oligonucleotide"
caagguacccuguaauuuu

SEQ ID NO: 1537 - RNA, 19 nt, Artificial Sequence
  source: /note="Description of Artificial Sequence: Synthetic oligonucleotide"
ucaacaggcaagguacccu

SEQ ID NO: 1538 - RNA, 19 nt, Artificial Sequence
  source: /note="Description of Artificial Sequence: Synthetic oligonucleotide"
uguucucucgggcuucaac

SEQ ID NO: 1539 - RNA, 19 nt, Artificial Sequence
  source: /note="Description of Artificial Sequence: Synthetic oligonucleotide"
auauaagcuguucucucgg

SEQ ID NO: 1540 - RNA, 19 nt, Artificial Sequence
  source: /note="Description of Artificial Sequence: Synthetic oligonucleotide"
aaggcuguaagauauaagc

SEQ ID NO: 1541 - RNA, 19 nt, Artificial Sequence
  source: /note="Description of Artificial Sequence: Synthetic oligonucleotide"
ucacaguaaaggcuguaag

SEQ ID NO: 1542 - RNA, 19 nt, Artificial Sequence
  source: /note="Description of Artificial Sequence: Synthetic oligonucleotide"
ucgaaagccuuucuaauuc

SEQ ID NO: 1543 - RNA, 19 nt, Artificial Sequence
  source: /note="Description of Artificial Sequence: Synthetic oligonucleotide"
ggggcauauaucgaaagcc

SEQ ID NO: 1544 - RNA, 19 nt, Artificial Sequence
  source: /note="Description of Artificial Sequence: Synthetic oligonucleotide"
ucaccagggggcauauauc

SEQ ID NO: 1545 - RNA, 19 nt, Artificial Sequence
  source: /note="Description of Artificial Sequence: Synthetic oligonucleotide"
agcugugucgauuuucacc

SEQ ID NO: 1546 - RNA, 19 nt, Artificial Sequence
  source: /note="Description of Artificial Sequence: Synthetic oligonucleotide"
uuuaauuagagcugugucg

SEQ ID NO: 1547 - RNA, 19 nt, Artificial Sequence
  source: /note="Description of Artificial Sequence: Synthetic oligonucleotide"
ugucagcuuuaauuagagc

SEQ ID NO: 1548 - RNA, 19 nt, Artificial Sequence
  source: /note="Description of Artificial Sequence: Synthetic oligonucleotide"
ucaagcagaaaguugucag

SEQ ID NO: 1549 - RNA, 19 nt, Artificial Sequence
  source: /note="Description of Artificial Sequence: Synthetic oligonucleotide"
uguauuuucaagcagaaag

SEQ ID NO: 1550 - RNA, 19 nt, Artificial Sequence
  source: /note="Description of Artificial Sequence: Synthetic oligonucleotide"
ugggcuggcaguguauuuu

SEQ ID NO: 1551 - RNA, 19 nt, Artificial Sequence
  source: /note="Description of Artificial Sequence: Synthetic oligonucleotide"
uguaaaggugcucugggcu

SEQ ID NO: 1552 - RNA, 19 nt, Artificial Sequence
  source: /note="Description of Artificial Sequence: Synthetic oligonucleotide"
auggccaauguaaaggugc

SEQ ID NO: 1553 - RNA, 19 nt, Artificial Sequence
  source: /note="Description of Artificial Sequence: Synthetic oligonucleotide"
acgcagaaauggccaaugu

SEQ ID NO: 1554 - RNA, 19 nt, Artificial Sequence
  source: /note="Description of Artificial Sequence: Synthetic oligonucleotide"
agggaaagagcauacgcag

SEQ ID NO: 1555 - RNA, 19 nt, Artificial Sequence
  source: /note="Description of Artificial Sequence: Synthetic oligonucleotide"
uuuuaucucccagggaaag

SEQ ID NO: 1556 - RNA, 19 nt, Artificial Sequence
  source: /note="Description of Artificial Sequence: Synthetic oligonucleotide"
ugugggugaguuuuaucuc

SEQ ID NO: 1557 - RNA, 19 nt, Artificial Sequence
  source: /note="Description of Artificial Sequence: Synthetic oligonucleotide"
aacgaaacugugggugagu

SEQ ID NO: 1558 - RNA, 19 nt, Artificial Sequence
  source: /note="Description of Artificial Sequence: Synthetic oligonucleotide"
aaacaauugaacgaaacug

SEQ ID NO: 1559 - RNA, 19 nt, Artificial Sequence
  source: /note="Description of Artificial Sequence: Synthetic oligonucleotide"
uucaaagcugaaacaauug

SEQ ID NO: 1560 - RNA, 19 nt, Artificial Sequence
  source: /note="Description of Artificial Sequence: Synthetic oligonucleotide"
aaagcuucucucuucaaag

SEQ ID NO: 1561 - RNA, 19 nt, Artificial Sequence
  source: /note="Description of Artificial Sequence: Synthetic oligonucleotide"
uuuaaccaaagcuucucuc

SEQ ID NO: 1562 - RNA, 19 nt, Artificial Sequence
  source: /note="Description of Artificial Sequence: Synthetic oligonucleotide"
uggguggauuaccuuuaac

SEQ ID NO: 1563 - RNA, 19 nt, Artificial Sequence
  source: /note="Description of Artificial Sequence: Synthetic oligonucleotide"
aacgauaaauggguggauu

SEQ ID NO: 1564 - RNA, 19 nt, Artificial Sequence
  source: /note="Description of Artificial Sequence: Synthetic oligonucleotide"
uuuccaaaaacgauaaaug

SEQ ID NO: 1565 - RNA, 19 nt, Artificial Sequence
  source: /note="Description of Artificial Sequence: Synthetic oligonucleotide"
ugaagauugucuuuccaaa

SEQ ID NO: 1566 - RNA, 19 nt, Artificial Sequence
  source: /note="Description of Artificial Sequence: Synthetic oligonucleotide"
ugucuuuaugcugaagauu

SEQ ID NO: 1567 - RNA, 19 nt, Artificial Sequence
  source: /note="Description of Artificial Sequence: Synthetic oligonucleotide"
guacagagcugucuuuaug

SEQ ID NO: 1568 - RNA, 19 nt, Artificial Sequence
  source: /note="Description of Artificial Sequence: Synthetic oligonucleotide"
accaguguuagguacagag

SEQ ID NO: 1569 - RNA, 19 nt, Artificial Sequence
  source: /note="Description of Artificial Sequence: Synthetic oligonucleotide"
auacgugccguaccagugu

SEQ ID NO: 1570 - RNA, 19 nt, Artificial Sequence
  source: /note="Description of Artificial Sequence: Synthetic oligonucleotide"
uguuucuaccauacgugcc

SEQ ID NO: 1571 - RNA, 19 nt, Artificial Sequence
  source: /note="Description of Artificial Sequence: Synthetic oligonucleotide"
auaggcaguuguuucuacc

SEQ ID NO: 1572 - RNA, 19 nt, Artificial Sequence
  source: /note="Description of Artificial Sequence: Synthetic oligonucleotide"
aguaaagcauaggcaguug

SEQ ID NO: 1573 - RNA, 19 nt, Artificial Sequence
  source: /note="Description of Artificial Sequence: Synthetic oligonucleotide"
uucagacuggugaguaaag

SEQ ID NO: 1574 - RNA, 19 nt, Artificial Sequence
  source: /note="Description of Artificial Sequence: Synthetic oligonucleotide"
auaucuuucaaguucagac

SEQ ID NO: 1575 - RNA, 19 nt, Artificial Sequence
  source: /note="Description of Artificial Sequence: Synthetic oligonucleotide"
uaauuuauaucuuucaagu

SEQ ID NO: 1576 - RNA, 19 nt, Artificial Sequence
  source: /note="Description of Artificial Sequence: Synthetic oligonucleotide"
uggguuaacauaauuuaua

SEQ ID NO: 1577 - RNA, 19 nt, Artificial Sequence
  source: /note="Description of Artificial Sequence: Synthetic oligonucleotide"
auuugaugacuggguuaac

SEQ ID NO: 1578 - RNA, 19 nt, Artificial Sequence
  source: /note="Description of Artificial Sequence: Synthetic oligonucleotide"
ucugauagccauuugauga

SEQ ID NO: 1579 - RNA, 19 nt, Artificial Sequence
  source: /note="Description of Artificial Sequence: Synthetic oligonucleotide"
uaccucugcucuucugaua

SEQ ID NO: 1580 - RNA, 19 nt, Artificial Sequence
  source: /note="Description of Artificial Sequence: Synthetic oligonucleotide"
aagccaccuccauaccucu

SEQ ID NO: 1581 - RNA, 19 nt, Artificial Sequence
  source: /note="Description of Artificial Sequence: Synthetic oligonucleotide"
guugaauaaaagccaccuc

SEQ ID NO: 1582 - RNA, 19 nt, Artificial Sequence
  source: /note="Description of Artificial Sequence: Synthetic oligonucleotide"
uuguguccuggguugaaua

SEQ ID NO: 1583 - RNA, 19 nt, Artificial Sequence
  source: /note="Description of Artificial Sequence: Synthetic oligonucleotide"
auggcauugauuguguccu

SEQ ID NO: 1584 - RNA, 19 nt, Artificial Sequence
  source: /note="Description of Artificial Sequence: Synthetic oligonucleotide"
cccucaauggcauugauug

SEQ ID NO: 1585 - RNA, 19 nt, Artificial Sequence
  source: /note="Description of Artificial Sequence: Synthetic oligonucleotide"
uuccgucaggcccucaaug

SEQ ID NO: 1586 - RNA, 19 nt, Artificial Sequence
  source: /note="Description of Artificial Sequence: Synthetic oligonucleotide"
ccaggagugaauauuccgu

SEQ ID NO: 1587 - RNA, 19 nt, Artificial Sequence
  source: /note="Description of Artificial Sequence: Synthetic oligonucleotide"
uuguuuaaccaggagugaa

SEQ ID NO: 1588 - RNA, 19 nt, Artificial Sequence
  source: /note="Description of Artificial Sequence: Synthetic oligonucleotide"
caagcggaguuguuuaacc

SEQ ID NO: 1589 - RNA, 19 nt, Artificial Sequence
  source: /note="Description of Artificial Sequence: Synthetic oligonucleotide"
gauguccauacucaagcgg

SEQ ID NO: 1590 - RNA, 19 nt, Artificial Sequence
  source: /note="Description of Artificial Sequence: Synthetic oligonucleotide"
guaagaaacaucgaugucc

SEQ ID NO: 1591 - RNA, 19 nt, Artificial Sequence
  source: /note="Description of Artificial Sequence: Synthetic oligonucleotide"
augcuuguaagaaacaucg

SEQ ID NO: 1592 - RNA, 19 nt, Artificial Sequence
  source: /note="Description of Artificial Sequence: Synthetic oligonucleotide"
uaaggcaccuuuaugcuug

SEQ ID NO: 1593 - RNA, 19 nt, Artificial Sequence
  source: /note="Description of Artificial Sequence: Synthetic oligonucleotide"
uuauaauuauguaaggcac

SEQ ID NO: 1594 - RNA, 19 nt, Artificial Sequence
  source: /note="Description of Artificial Sequence: Synthetic oligonucleotide"
ugucauuuuauaauuaugu

SEQ ID NO: 1595 - RNA, 19 nt, Artificial Sequence
  source: /note="Description of Artificial Sequence: Synthetic oligonucleotide"
aauucuugucugucauuuu

SEQ ID NO: 1596 - RNA, 19 nt, Artificial Sequence
  source: /note="Description of Artificial Sequence: Synthetic oligonucleotide"
ccucccaaggaaauucuug

SEQ ID NO: 1597 - RNA, 19 nt, Artificial Sequence
  source: /note="Description of Artificial Sequence: Synthetic oligonucleotide"
cucuacuggccucccaagg

SEQ ID NO: 1598 - RNA, 19 nt, Artificial Sequence
  source: /note="Description of Artificial Sequence: Synthetic oligonucleotide"
auugagaagcaccucuacu

SEQ ID NO: 1599 - RNA, 19 nt, Artificial Sequence
  source: /note="Description of Artificial Sequence: Synthetic oligonucleotide"
ugaggucaucauugagaag

SEQ ID NO: 1600 - RNA, 19 nt, Artificial Sequence
  source: /note="Description of Artificial Sequence: Synthetic oligonucleotide"
uguacugacaaugagguca

SEQ ID NO: 1601 - RNA, 19 nt, Artificial Sequence
  source: /note="Description of Artificial Sequence: Synthetic oligonucleotide"
ugccaaauccuguacugac

SEQ ID NO: 1602 - RNA, 19 nt, Artificial Sequence
  source: /note="Description of Artificial Sequence: Synthetic oligonucleotide"
caagccacugccaaauccu

SEQ ID NO: 1603 - RNA, 19 nt, Artificial Sequence
  source: /note="Description of Artificial Sequence: Synthetic oligonucleotide"
auguacuguagccaagcca

SEQ ID NO: 1604 - RNA, 19 nt, Artificial Sequence
  source: /note="Description of Artificial Sequence: Synthetic oligonucleotide"
uuguuacauguacuguagc

SEQ ID NO: 1605 - RNA, 19 nt, Artificial Sequence
  source: /note="Description of Artificial Sequence: Synthetic oligonucleotide"
uuugugaacuacaguuguu

SEQ ID NO: 1606 - RNA, 19 nt, Artificial Sequence
  source: /note="Description of Artificial Sequence: Synthetic oligonucleotide"
uacugguuuugugaacuac

SEQ ID NO: 1607 - RNA, 19 nt, Artificial Sequence
  source: /note="Description of Artificial Sequence: Synthetic oligonucleotide"
uccucagagguacugguuu

SEQ ID NO: 1608 - RNA, 19 nt, Artificial Sequence
  source: /note="Description of Artificial Sequence: Synthetic oligonucleotide"
aaagcugcaaacuuccuca

SEQ ID NO: 1609 - RNA, 19 nt, Artificial Sequence
  source: /note="Description of Artificial Sequence: Synthetic oligonucleotide"
uuuucaaauaaaagcugca

SEQ ID NO: 1610 - RNA, 19 nt, Artificial Sequence
  source: /note="Description of Artificial Sequence: Synthetic oligonucleotide"
ugaguaucgauuuucaaau

SEQ ID NO: 1611 - RNA, 19 nt, Artificial Sequence
  source: /note="Description of Artificial Sequence: Synthetic oligonucleotide"
uucaauauccugaguaucg

SEQ ID NO: 1612 - RNA, 19 nt, Artificial Sequence
  source: /note="Description of Artificial Sequence: Synthetic oligonucleotide"
gugggaugcuucaauaucc

SEQ ID NO: 1613 - RNA, 19 nt, Artificial Sequence
  source: /note="Description of Artificial Sequence: Synthetic oligonucleotide"
cucuguagugggaugcuuc

SEQ ID NO: 1614 - RNA, 19 nt, Artificial Sequence
  source: /note="Description of Artificial Sequence: Synthetic oligonucleotide"
uuuccguagccucuguagu

SEQ ID NO: 1615 - RNA, 19 nt, Artificial Sequence
  source: /note="Description of Artificial Sequence: Synthetic oligonucleotide"
uuuguaaucagaguuuccg

SEQ ID NO: 1616 - RNA, 19 nt, Artificial Sequence
  source: /note="Description of Artificial Sequence: Synthetic oligonucleotide"
uacuaugcguuuguaauca

SEQ ID NO: 1617 - RNA, 19 nt, Artificial Sequence
  source: /note="Description of Artificial Sequence: Synthetic oligonucleotide"
cuggcacaugcuacuaugc

SEQ ID NO: 1618 - RNA, 19 nt, Artificial Sequence
  source: /note="Description of Artificial Sequence: Synthetic oligonucleotide"
gcuuguagcuggcacaugc

SEQ ID NO: 1619 - RNA, 19 nt, Artificial Sequence
  source: /note="Description of Artificial Sequence: Synthetic oligonucleotide"
uucccugcugggcuuguag

SEQ ID NO: 1620 - RNA, 19 nt, Artificial Sequence
  source: /note="Description of Artificial Sequence: Synthetic oligonucleotide"
ugaugauucuucccugcug

SEQ ID NO: 1621 - RNA, 19 nt, Artificial Sequence
  source: /note="Description of Artificial Sequence: Synthetic oligonucleotide"
aggauccagaugaugauuc

SEQ ID NO: 1622 - RNA, 19 nt, Artificial Sequence
  source: /note="Description of Artificial Sequence: Synthetic oligonucleotide"
aucaccgcaugagaggauc

SEQ ID NO: 1623 - RNA, 19 nt, Artificial Sequence
  source: /note="Description of Artificial Sequence: Synthetic oligonucleotide"
auguccaucaccgcaugag

SEQ ID NO: 1624 - RNA, 19 nt, Artificial Sequence
  source: /note="Description of Artificial Sequence: Synthetic oligonucleotide"
aggcaaggagauguccauc

SEQ ID NO: 1625 - RNA, 19 nt, Artificial Sequence
  source: /note="Description of Artificial Sequence: Synthetic oligonucleotide"
acugauuccaguaggcaag

SEQ ID NO: 1626 - RNA, 19 nt, Artificial Sequence
  source: /note="Description of Artificial Sequence: Synthetic oligonucleotide"
ucuucauuugcacugauuc

SEQ ID NO: 1627 - RNA, 19 nt, Artificial Sequence
  source: /note="Description of Artificial Sequence: Synthetic oligonucleotide"
uuuuaagucuucuucauuu

SEQ ID NO: 1628 - RNA, 19 nt, Artificial Sequence
  source: /note="Description of Artificial Sequence: Synthetic oligonucleotide"
caagggcuuuuaagucuuc

SEQ ID NO: 1629 - RNA, 19 nt, Artificial Sequence
  source: /note="Description of Artificial Sequence: Synthetic oligonucleotide"
auccaccccuuccacaagg

SEQ ID NO: 1630 - RNA, 19 nt, Artificial Sequence
  source: /note="Description of Artificial Sequence: Synthetic oligonucleotide"
auaguugauccaccccuuc

SEQ ID NO: 1631 - RNA, 19 nt, Artificial Sequence
  source: /note="Description of Artificial Sequence: Synthetic oligonucleotide"
uaaucagugaauaguugau

SEQ ID NO: 1632 - RNA, 19 nt, Artificial Sequence
  source: /note="Description of Artificial Sequence: Synthetic oligonucleotide"
uuugauuugguaaucagug

SEQ ID NO: 1633 - RNA, 19 nt, Artificial Sequence
  source: /note="Description of Artificial Sequence: Synthetic oligonucleotide"
uaacauguccaucuuugau

SEQ ID NO: 1634 - RNA, 19 nt, Artificial Sequence
  source: /note="Description of Artificial Sequence: Synthetic oligonucleotide"
guugcagaauaacaugucc

SEQ ID NO: 1635 - RNA, 19 nt, Artificial Sequence
  source: /note="Description of Artificial Sequence: Synthetic oligonucleotide"
aaucgaauucaguugcaga

SEQ ID NO: 1636 - RNA, 19 nt, Artificial Sequence
  source: /note="Description of Artificial Sequence: Synthetic oligonucleotide"
acuggagggaaucgaauuc

SEQ ID NO: 1637 - RNA, 19 nt, Artificial Sequence
  source: /note="Description of Artificial Sequence: Synthetic oligonucleotide"
aaaggaaaucacuggaggg

SEQ ID NO: 1638 - RNA, 19 nt, Artificial Sequence
  source: /note="Description of Artificial Sequence: Synthetic oligonucleotide"
aucguacacaaaggaaauc

SEQ ID NO: 1639 - RNA, 19 nt, Artificial Sequence
  source: /note="Description of Artificial Sequence: Synthetic oligonucleotide"
caaauauccggaaucguac

SEQ ID NO: 1640 - RNA, 19 nt, Artificial Sequence
  source: /note="Description of Artificial Sequence: Synthetic oligonucleotide"
caaagaguucaaauauccg

SEQ ID NO: 1641 - RNA, 19 nt, Artificial Sequence
  source: /note="Description of Artificial Sequence: Synthetic oligonucleotide"
aaacccaacuucaaagagu

SEQ ID NO: 1642 - RNA, 19 nt, Artificial Sequence
  source: /note="Description of Artificial Sequence: Synthetic oligonucleotide"
aggacugagaaacccaacu

SEQ ID NO: 1643 - RNA, 19 nt, Artificial Sequence
  source: /note="Description of Artificial Sequence: Synthetic oligonucleotide"
aaaguggcaggacugagaa

SEQ ID NO: 1644 - RNA, 19 nt, Artificial Sequence
  source: /note="Description of Artificial Sequence: Synthetic oligonucleotide"
uucguacacugugaaagug

SEQ ID NO: 1645 - RNA, 19 nt, Artificial Sequence
  source: /note="Description of Artificial Sequence: Synthetic oligonucleotide"
gugguauucguacacugug

SEQ ID NO: 1646 - RNA, 19 nt, Artificial Sequence
  source: /note="Description of Artificial Sequence: Synthetic oligonucleotide"
uguuuaucuggucuguggu

SEQ ID NO: 1647 - RNA, 19 nt, Artificial Sequence
  source: /note="Description of Artificial Sequence: Synthetic oligonucleotide"
ugguacacuguuuaucugg

SEQ ID NO: 1648 - RNA, 19 nt, Artificial Sequence
  source: /note="Description of Artificial Sequence: Synthetic oligonucleotide"
uauaaaacaugguacacug

SEQ ID NO: 1649 - RNA, 19 nt, Artificial Sequence
  source: /note="Description of Artificial Sequence: Synthetic oligonucleotide"
auuggaagugcuauaaaac

SEQ ID NO: 1650 - RNA, 19 nt, Artificial Sequence
  source: /note="Description of Artificial Sequence: Synthetic oligonucleotide"
ugaauuuugauauuggaag

SEQ ID NO: 1651 - RNA, 19 nt, Artificial Sequence
  source: /note="Description of Artificial Sequence: Synthetic oligonucleotide"
agacuuucugaauuuugau

SEQ ID NO: 1652 - RNA, 19 nt, Artificial Sequence
  source: /note="Description of Artificial Sequence: Synthetic oligonucleotide"
ggcuccuucacagacuuuc

SEQ ID NO: 1653 - RNA, 19 nt, Artificial Sequence
  source: /note="Description of Artificial Sequence: Synthetic oligonucleotide"
acuugcacgcggcuccuuc

SEQ ID NO: 1654 - RNA, 19 nt, Artificial Sequence
  source: /note="Description of Artificial Sequence: Synthetic oligonucleotide"
gcuucuacacacuugcacg

SEQ ID NO: 1655 - RNA, 19 nt, Artificial Sequence
  source: /note="Description of Artificial Sequence: Synthetic oligonucleotide"
gcccacaaucagcuucuac

SEQ ID NO: 1656 - RNA, 19 nt, Artificial Sequence
  source: /note="Description of Artificial Sequence: Synthetic oligonucleotide"
ugcauuugcccacaaucag

SEQ ID NO: 1657 - RNA, 19 nt, Artificial Sequence
  source: /note="Description of Artificial Sequence: Synthetic oligonucleotide"
caauucuuccugcauuugc

SEQ ID NO: 1658 - RNA, 19 nt, Artificial Sequence
  source: /note="Description of Artificial Sequence: Synthetic oligonucleotide"
uugucagauccaauucuuc

SEQ ID NO: 1659 - RNA, 19 nt, Artificial Sequence
  source: /note="Description of Artificial Sequence: Synthetic oligonucleotide"
ucucugcagagauugucag

SEQ ID NO: 1660 - RNA, 19 nt, Artificial Sequence
  source: /note="Description of Artificial Sequence: Synthetic oligonucleotide"
uuuguuuucuugucucugc

SEQ ID NO: 1661 - RNA, 19 nt, Artificial Sequence
  source: /note="Description of Artificial Sequence: Synthetic oligonucleotide"
caugcuguuuguuuucuug

SEQ ID NO: 1662 - RNA, 19 nt, Artificial Sequence
  source: /note="Description of Artificial Sequence: Synthetic oligonucleotide"
ucucugguuuacaugcugu

SEQ ID NO: 1663 - RNA, 19 nt, Artificial Sequence
  source: /note="Description of Artificial Sequence: Synthetic oligonucleotide"
aagcauaugcaaucucugg

SEQ ID NO: 1664 - RNA, 19 nt, Artificial Sequence
  source: /note="Description of Artificial Sequence: Synthetic oligonucleotide"
uaacuuuauaagcauaugc

SEQ ID NO: 1665 - RNA, 19 nt, Artificial Sequence
  source: /note="Description of Artificial Sequence: Synthetic oligonucleotide"
ugugaugcuaacuuuauaa

SEQ ID NO: 1666 - RNA, 19 nt, Artificial Sequence
  source: /note="Description of Artificial Sequence: Synthetic oligonucleotide"
uacagugauggaugugaug

SEQ ID NO: 1667 - RNA, 19 nt, Artificial Sequence
  source: /note="Description of Artificial Sequence: Synthetic oligonucleotide"
aaaacauuuucuacaguga

SEQ ID NO: 1668 - RNA, 19 nt, Artificial Sequence
  source: /note="Description of Artificial Sequence: Synthetic oligonucleotide"
cuugacaaaaacauuuucu

SEQ ID NO: 1669 - RNA, 19 nt, Artificial Sequence
  source: /note="Description of Artificial Sequence: Synthetic oligonucleotide"
uugccuuguacuugacaaa

SEQ ID NO: 1670 - RNA, 19 nt, Artificial Sequence
  source: /note="Description of Artificial Sequence: Synthetic oligonucleotide"
auauccagaaggguugccu

SEQ ID NO: 1671 - RNA, 19 nt, Artificial Sequence
  source: /note="Description of Artificial Sequence: Synthetic oligonucleotide"
uuuguagauauccagaagg

SEQ ID NO: 1672 - RNA, 19 nt, Artificial Sequence
  source: /note="Description of Artificial Sequence: Synthetic oligonucleotide"
uuccccaguuuuguagaua

SEQ ID NO: 1673 - RNA, 19 nt, Artificial Sequence
  source: /note="Description of Artificial Sequence: Synthetic oligonucleotide"
ucagcaacagcuuccccag

SEQ ID NO: 1674 - RNA, 19 nt, Artificial Sequence
  source: /note="Description of Artificial Sequence: Synthetic oligonucleotide"
gagucuuucucagcaacag

SEQ ID NO: 1675 - RNA, 19 nt, Artificial Sequence
  source: /note="Description of Artificial Sequence: Synthetic oligonucleotide"
ugaagguaaucucagaguc

SEQ ID NO: 1676 - RNA, 19 nt, Artificial Sequence
  source: /note="Description of Artificial Sequence: Synthetic oligonucleotide"
uuuuaaugaagguaaucuc

SEQ ID NO: 1677 - RNA, 19 nt, Artificial Sequence
  source: /note="Description of Artificial Sequence: Synthetic oligonucleotide"
uacagguuaccuuuuuaau

SEQ ID NO: 1678 - RNA, 19 nt, Artificial Sequence
  source: /note="Description of Artificial Sequence: Synthetic oligonucleotide"
ucagcguuaguacagguua

SEQ ID NO: 1679 - RNA, 19 nt, Artificial Sequence
  source: /note="Description of Artificial Sequence: Synthetic oligonucleotide"
uuuaccagcucagcguuag

SEQ ID NO: 1680 - RNA, 19 nt, Artificial Sequence
  source: /note="Description of Artificial Sequence: Synthetic oligonucleotide"
guacugucuuccuuuuacc

SEQ ID NO: 1681 - RNA, 19 nt, Artificial Sequence
  source: /note="Description of Artificial Sequence: Synthetic oligonucleotide"
auaauuaaguacugucuuc

SEQ ID NO: 1682 - RNA, 19 nt, Artificial Sequence
  source: /note="Description of Artificial Sequence: Synthetic oligonucleotide"
uucuuuacccauaauuaag

SEQ ID NO: 1683 - RNA, 19 nt, Artificial Sequence
  source: /note="Description of Artificial Sequence: Synthetic oligonucleotide"
uaucuggagggcuucuuua

SEQ ID NO: 1684 - RNA, 19 nt, Artificial Sequence
  source: /note="Description of Artificial Sequence: Synthetic oligonucleotide"
auuguauuuuaucuggagg

SEQ ID NO: 1685 - RNA, 19 nt, Artificial Sequence
  source: /note="Description of Artificial Sequence: Synthetic oligonucleotide"
ugaaacugaaauuguauuu

SEQ ID NO: 1686 - RNA, 19 nt, Artificial Sequence
  source: /note="Description of Artificial Sequence: Synthetic oligonucleotide"
guagauguaccugaaacug

SEQ ID NO: 1687 - RNA, 19 nt, Artificial Sequence
  source: /note="Description of Artificial Sequence: Synthetic oligonucleotide"
ucuaaaggguagauguacc

SEQ ID NO: 1688 - RNA, 19 nt, Artificial Sequence
  source: /note="Description of Artificial Sequence: Synthetic oligonucleotide"
aggucaaggaaucuaaagg

SEQ ID NO: 1689 - RNA, 19 nt, Artificial Sequence
  source: /note="Description of Artificial Sequence: Synthetic oligonucleotide"
uauucaauccaggucaagg

SEQ ID NO: 1690 - RNA, 19 nt, Artificial Sequence
  source: /note="Description of Artificial Sequence: Synthetic oligonucleotide"
cuaggccaguauucaaucc

SEQ ID NO: 1691 - RNA, 19 nt, Artificial Sequence
  source: /note="Description of Artificial Sequence: Synthetic oligonucleotide"
uguugugucucuaggccag

SEQ ID NO: 1692 - RNA, 19 nt, Artificial Sequence
  source: /note="Description of Artificial Sequence: Synthetic oligonucleotide"
gaugaacauguugugucuc

SEQ ID NO: 1693 - RNA, 19 nt, Artificial Sequence
  source: /note="Description of Artificial Sequence: Synthetic oligonucleotide"
aaugcuugacacgaugaac

SEQ ID NO: 1694 - RNA, 19 nt, Artificial Sequence
  source: /note="Description of Artificial Sequence: Synthetic oligonucleotide"
uuagcuaaaaaugcuugac

SEQ ID NO: 1695 - RNA, 19 nt, Artificial Sequence
  source: /note="Description of Artificial Sequence: Synthetic oligonucleotide"
aaauucaucuaaauuagcu

SEQ ID NO: 1696 - RNA, 19 nt, Artificial Sequence
  source: /note="Description of Artificial Sequence: Synthetic oligonucleotide"
aucuucggcaaauucaucu

SEQ ID NO: 1697 - RNA, 19 nt, Artificial Sequence
  source: /note="Description of Artificial Sequence: Synthetic oligonucleotide"
uuuaaaaagauaucuucgg

SEQ ID NO: 1698 - RNA, 19 nt, Artificial Sequence
  source: /note="Description of Artificial Sequence: Synthetic oligonucleotide"
uuagcauccauuuaaaaag

SEQ ID NO: 1699 - RNA, 19 nt, Artificial Sequence
  source: /note="Description of Artificial Sequence: Synthetic oligonucleotide"
uucaggaauuuuagcaucc

SEQ ID NO: 1700 - RNA, 19 nt, Artificial Sequence
  source: /note="Description of Artificial Sequence: Synthetic oligonucleotide"
cugaacuucaggaauuuua

SEQ ID NO: 1701 - RNA, 19 nt, Artificial Sequence
  source: /note="Description of Artificial Sequence: Synthetic oligonucleotide"
aacuguaugcagcugaacu

SEQ ID NO: 1702 - RNA, 19 nt, Artificial Sequence
  source: /note="Description of Artificial Sequence: Synthetic oligonucleotide"
auaagugcaaacuguaugc

SEQ ID NO: 1703 - RNA, 19 nt, Artificial Sequence
  source: /note="Description of Artificial Sequence: Synthetic oligonucleotide"
acaacaggaguccauaagu

SEQ ID NO: 1704 - RNA, 19 nt, Artificial Sequence
  source: /note="Description of Artificial Sequence: Synthetic oligonucleotide"
acuucaacaacaggagucc

SEQ ID NO: 1705 - RNA, 19 nt, Artificial Sequence
  source: /note="Description of Artificial Sequence: Synthetic oligonucleotide"
aaaaaaacgaacuucaaca

SEQ ID NO: 1706 - RNA, 19 nt, Artificial Sequence
  source: /note="Description of Artificial Sequence: Synthetic oligonucleotide"
aaaagaagaaaacaaaaaa

SEQ ID NO: 1707 - RNA, 19 nt, Artificial Sequence
  source: /note="Description of Artificial Sequence: Synthetic oligonucleotide"
aauguuuaaaaaaagaaga

SEQ ID NO: 1708 - RNA, 19 nt, Artificial Sequence
  source: /note="Description of Artificial Sequence: Synthetic oligonucleotide"
agcuaugaauguuuaaaaa

SEQ ID NO: 1709 - RNA, 19 nt, Artificial Sequence
  source: /note="Description of Artificial Sequence: Synthetic oligonucleotide"
uacaaauaagaccagcuau

SEQ ID NO: 1710 - RNA, 19 nt, Artificial Sequence
  source: /note="Description of Artificial Sequence: Synthetic oligonucleotide"
ugagcuuuacaaauaagac

SEQ ID NO: 1711 - RNA, 19 nt, Artificial Sequence
  source: /note="Description of Artificial Sequence: Synthetic oligonucleotide"
ucuaaguaaagugagcuuu

SEQ ID NO: 1712 - RNA, 19 nt, Artificial Sequence
  source: /note="Description of Artificial Sequence: Synthetic oligonucleotide"
agugccacuaauucuaagu

SEQ ID NO: 1713 - RNA, 19 nt, Artificial Sequence
  source: /note="Description of Artificial Sequence: Synthetic oligonucleotide"
aauaaaagcaagugccacu

SEQ ID NO: 1714 - RNA, 19 nt, Artificial Sequence
  source: /note="Description of Artificial Sequence: Synthetic oligonucleotide"
aucauucucuaauaaaagc

SEQ ID NO: 1715 - RNA, 19 nt, Artificial Sequence
  source: /note="Description of Artificial Sequence: Synthetic oligonucleotide"
agcauuugaaaucauucuc

SEQ ID NO: 1716 - RNA, 19 nt, Artificial Sequence
  source: /note="Description of Artificial Sequence: Synthetic oligonucleotide"
aaaguuacagcauuugaaa

SEQ ID NO: 1717 - RNA, 19 nt, Artificial Sequence
  source: /note="Description of Artificial Sequence: Synthetic oligonucleotide"
uguuauuucagaaaguuac

SEQ ID NO: 1718 - RNA, 19 nt, Artificial Sequence
  source: /note="Description of Artificial Sequence: Synthetic oligonucleotide"
uccaaggccauguuauuuc

SEQ ID NO: 1719 - RNA, 19 nt, Artificial Sequence
  source: /note="Description of Artificial Sequence: Synthetic oligonucleotide"
gucuucaugcccuccaagg

SEQ ID NO: 1720 - RNA, 19 nt, Artificial Sequence
  source: /note="Description of Artificial Sequence: Synthetic oligonucleotide"
guaucugucuucaugcccu

SEQ ID NO: 1721 - RNA, 19 nt, Artificial Sequence
  source: /note="Description of Artificial Sequence: Synthetic oligonucleotide"
auaaccuuggaggaguauc

SEQ ID NO: 1722 - RNA, 19 nt, Artificial Sequence
  source: /note="Description of Artificial Sequence: Synthetic oligonucleotide"
uguccaauaaccuuggagg

SEQ ID NO: 1723 - RNA, 19 nt, Artificial Sequence
  source: /note="Description of Artificial Sequence: Synthetic oligonucleotide"
uuuauuguuuccggugucc

SEQ ID NO: 1724 - RNA, 19 nt, Artificial Sequence
  source: /note="Description of Artificial Sequence: Synthetic oligonucleotide"
uguuccaauuuauuguuuc

SEQ ID NO: 1725 - RNA, 19 nt, Artificial Sequence
  source: /note="Description of Artificial Sequence: Synthetic oligonucleotide"
uuugaggagguguuccaau

SEQ ID NO: 1726 - RNA, 19 nt, Artificial Sequence
  source: /note="Description of Artificial Sequence: Synthetic oligonucleotide"
ugagugguagguuugagga

SEQ ID NO: 1727 - RNA, 19 nt, Artificial Sequence
  source: /note="Description of Artificial Sequence: Synthetic oligonucleotide"
aaacauuccugagugguag

SEQ ID NO: 1728 - RNA, 19 nt, Artificial Sequence
  source: /note="Description of Artificial Sequence: Synthetic oligonucleotide"
uucggccccagcaaacauu

SEQ ID NO: 1729 - RNA, 19 nt, Artificial Sequence
  source: /note="Description of Artificial Sequence: Synthetic oligonucleotide"
uguucuuucggccccagca

SEQ ID NO: 1730 - RNA, 19 nt, Artificial Sequence
  source: /note="Description of Artificial Sequence: Synthetic oligonucleotide"
uuucaauggacuguucuuu

SEQ ID NO: 1731 - RNA, 19 nt, Artificial Sequence
  source: /note="Description of Artificial Sequence: Synthetic oligonucleotide"
guaauacucccuuucaaug

SEQ ID NO: 1732 - RNA, 19 nt, Artificial Sequence
  source: /note="Description of Artificial Sequence: Synthetic oligonucleotide"
cauguuuuuguaauacucc

SEQ ID NO: 1733 - RNA, 19 nt, Artificial Sequence
  source: /note="Description of Artificial Sequence: Synthetic oligonucleotide"
caagcaaaggccauguuuu

SEQ ID NO: 1734 - RNA, 19 nt, Artificial Sequence
  source: /note="Description of Artificial Sequence: Synthetic oligonucleotide"
uuuucuuucaagcaaaggc

SEQ ID NO: 1735 - RNA, 19 nt, Artificial Sequence
  source: /note="Description of Artificial Sequence: Synthetic oligonucleotide"
uuccuugguauuuucuuuc

SEQ ID NO: 1736 - RNA, 19 nt, Artificial Sequence
  source: /note="Description of Artificial Sequence: Synthetic oligonucleotide"
ucaguuuccuguuccuugg

SEQ ID NO: 1737 - RNA, 19 nt, Artificial Sequence
  source: /note="Description of Artificial Sequence: Synthetic oligonucleotide"
caggcuuuaaugaucaguu

SEQ ID NO: 1738 - RNA, 19 nt, Artificial Sequence
  source: /note="Description of Artificial Sequence: Synthetic oligonucleotide"
agcaaacucaggcuuuaau

SEQ ID NO: 1739 - DNA, 21 bp, Artificial Sequence
  source: /note="Description of Artificial Sequence: Synthetic oligonucleotide"
  source: /note="Description of Combined DNA/RNA Molecule: Synthetic oligonucleotide"
uauccgugguuuccugcuatt

SEQ ID NO: 1740 - DNA, 21 bp, Artificial Sequence
  source: /note="Description of Artificial Sequence: Synthetic oligonucleotide"
  source: /note="Description of Combined DNA/RNA Molecule: Synthetic oligonucleotide"
gguuuccugcuaccuccaatt

SEQ ID NO: 1741 - DNA, 21 bp, Artificial Sequence
  source: /note="Description of Artificial Sequence: Synthetic oligonucleotide"
  source: /note="Description of Combined DNA/RNA Molecule: Synthetic oligonucleotide"
ccuccaaccaugggccuuutt

SEQ ID NO: 1742 - DNA, 21 bp, Artificial Sequence
  source: /note="Description of Artificial Sequence: Synthetic oligonucleotide"
  source: /note="Description of Combined DNA/RNA Molecule: Synthetic oligonucleotide"
gggccuuuugggaauacuutt

SEQ ID NO: 1743 - DNA, 21 bp, Artificial Sequence
  source: /note="Description of Artificial Sequence: Synthetic oligonucleotide"
  source: /note="Description of Combined DNA/RNA Molecule: Synthetic oligonucleotide"
ggaauacuuuguuuuuuaatt

SEQ ID NO: 1744 - DNA, 21 bp, Artificial Sequence
  source: /note="Description of Artificial Sequence: Synthetic oligonucleotide"
  source: /note="Description of Combined DNA/RNA Molecule: Synthetic oligonucleotide"
cuuuguuuuuuaaucuucctt

SEQ ID NO: 1745 - DNA, 21 bp, Artificial Sequence
  source: /note="Description of Artificial Sequence: Synthetic oligonucleotide"
  source: /note="Description of Combined DNA/RNA Molecule: Synthetic oligonucleotide"
cuuccuggggaaaaccuggtt

SEQ ID NO: 1746 - DNA, 21 bp, Artificial Sequence
  source: /note="Description of Artificial Sequence: Synthetic oligonucleotide"
  source: /note="Description of Combined DNA/RNA Molecule: Synthetic oligonucleotide"
ggaaaaccuggggacaggatt

SEQ ID NO: 1747 - DNA, 21 bp, Artificial Sequence
  source: /note="Description of Artificial Sequence: Synthetic oligonucleotide"
  source: /note="Description of Combined DNA/RNA Molecule: Synthetic oligonucleotide"
gggacaggagcaaacauautt

SEQ ID NO: 1748 - DNA, 21 bp, Artificial Sequence
  source: /note="Description of Artificial Sequence: Synthetic oligonucleotide"
  source: /note="Description of Combined DNA/RNA Molecule: Synthetic oligonucleotide"
caaacauaugucauuucagtt

SEQ ID NO: 1749 - DNA, 21 bp, Artificial Sequence
  source: /note="Description of Artificial Sequence: Synthetic oligonucleotide"
  source: /note="Description of Combined DNA/RNA Molecule: Synthetic oligonucleotide"
cauuucagcaccaaaaauatt

SEQ ID NO: 1750 - DNA, 21 bp, Artificial Sequence
  source: /note="Description of Artificial Sequence: Synthetic oligonucleotide"
  source: /note="Description of Combined DNA/RNA Molecule: Synthetic oligonucleotide"
gcaccaaaaauauuccgugtt

SEQ ID NO: 1751 - DNA, 21 bp, Artificial Sequence
  source: /note="Description of Artificial Sequence: Synthetic oligonucleotide"
  source: /note="Description of Combined DNA/RNA Molecule: Synthetic oligonucleotide"
ccguguuggagcaucugaatt

SEQ ID NO: 1752 - DNA, 21 bp, Artificial Sequence
  source: /note="Description of Artificial Sequence: Synthetic oligonucleotide"
  source: /note="Description of Combined DNA/RNA Molecule: Synthetic oligonucleotide"
ggagcaucugaaaauauugtt

SEQ ID NO: 1753 - DNA, 21 bp, Artificial Sequence
  source: /note="Description of Artificial Sequence: Synthetic oligonucleotide"
  source: /note="Description of Combined DNA/RNA Molecule: Synthetic oligonucleotide"
gaaaauauugugauucaagtt

SEQ ID NO: 1754 - DNA, 21 bp, Artificial Sequence
  source: /note="Description of Artificial Sequence: Synthetic oligonucleotide"
  source: /note="Description of Combined DNA/RNA Molecule: Synthetic oligonucleotide"
gauucaaguuuauggauactt

SEQ ID NO: 1755 - DNA, 21 bp, Artificial Sequence
  source: /note="Description of Artificial Sequence: Synthetic oligonucleotide"
  source: /note="Description of Combined DNA/RNA Molecule: Synthetic oligonucleotide"
ggauacacugaagcauuugtt

SEQ ID NO: 1756 - DNA, 21 bp, Artificial Sequence
  source: /note="Description of Artificial Sequence: Synthetic oligonucleotide"
  source: /note="Description of Combined DNA/RNA Molecule: Synthetic oligonucleotide"
gaagcauuugaugcaacaatt

SEQ ID NO: 1757 - DNA, 21 bp, Artificial Sequence
  source: /note="Description of Artificial Sequence: Synthetic oligonucleotide"
  source: /note="Description of Combined DNA/RNA Molecule: Synthetic oligonucleotide"
ugcaacaaucucuauuaaatt

SEQ ID NO: 1758 - DNA, 21 bp, Artificial Sequence
  source: /note="Description of Artificial Sequence: Synthetic oligonucleotide"
  source: /note="Description of Combined DNA/RNA Molecule: Synthetic oligonucleotide"
aaucucuauuaaaaguuautt

SEQ ID NO: 1759 - DNA, 21 bp, Artificial Sequence
  source: /note="Description of Artificial Sequence: Synthetic oligonucleotide"
  source: /note="Description of Combined DNA/RNA Molecule: Synthetic oligonucleotide"
aaguuauccugauaaaaaatt

SEQ ID NO: 1760 - DNA, 21 bp, Artificial Sequence
  source: /note="Description of Artificial Sequence: Synthetic oligonucleotide"
  source: /note="Description of Combined DNA/RNA Molecule: Synthetic oligonucleotide"
cugauaaaaaauuuaguuatt

SEQ ID NO: 1761 - DNA, 21 bp, Artificial Sequence
  source: /note="Description of Artificial Sequence: Synthetic oligonucleotide"
  source: /note="Description of Combined DNA/RNA Molecule: Synthetic oligonucleotide"
uuaguuacuccucaggccatt

SEQ ID NO: 1762 - DNA, 21 bp, Artificial Sequence
  source: /note="Description of Artificial Sequence: Synthetic oligonucleotide"
  source: /note="Description of Combined DNA/RNA Molecule: Synthetic oligonucleotide"
ccucaggccauguucauuutt

SEQ ID NO: 1763 - DNA, 21 bp, Artificial Sequence
  source: /note="Description of Artificial Sequence: Synthetic oligonucleotide"
  source: /note="Description of Combined DNA/RNA Molecule: Synthetic oligonucleotide"
uucauuuauccucagagaatt

SEQ ID NO: 1764 - DNA, 21 bp, Artificial Sequence
  source: /note="Description of Artificial Sequence: Synthetic oligonucleotide"
  source: /note="Description of Combined DNA/RNA Molecule: Synthetic oligonucleotide"
cucagagaauaaauuccaatt

SEQ ID NO: 1765 - DNA, 21 bp, Artificial Sequence
  source: /note="Description of Artificial Sequence: Synthetic oligonucleotide"
  source: /note="Description of Combined DNA/RNA Molecule: Synthetic oligonucleotide"
aauaaauuccaaaacucugtt

SEQ ID NO: 1766 - DNA, 21 bp, Artificial Sequence
  source: /note="Description of Artificial Sequence: Synthetic oligonucleotide"
  source: /note="Description of Combined DNA/RNA Molecule: Synthetic oligonucleotide"
cucugcaaucuuaacaauatt

SEQ ID NO: 1767 - DNA, 21 bp, Artificial Sequence
  source: /note="Description of Artificial Sequence: Synthetic oligonucleotide"
  source: /note="Description of Combined DNA/RNA Molecule: Synthetic oligonucleotide"
cuuaacaauacaaccaaaatt

SEQ ID NO: 1768 - DNA, 21 bp, Artificial Sequence
  source: /note="Description of Artificial Sequence: Synthetic oligonucleotide"
  source: /note="Description of Combined DNA/RNA Molecule: Synthetic oligonucleotide"
caaccaaaacaauugccugtt

SEQ ID NO: 1769 - DNA, 21 bp, Artificial Sequence
  source: /note="Description of Artificial Sequence: Synthetic oligonucleotide"
  source: /note="Description of Combined DNA/RNA Molecule: Synthetic oligonucleotide"
caauugccuggaggacaaatt

SEQ ID NO: 1770 - DNA, 21 bp, Artificial Sequence
  source: /note="Description of Artificial Sequence: Synthetic oligonucleotide"
  source: /note="Description of Combined DNA/RNA Molecule: Synthetic oligonucleotide"
ggacaaaacccaguuucuutt

SEQ ID NO: 1771 - DNA, 21 bp, Artificial Sequence
  source: /note="Description of Artificial Sequence: Synthetic oligonucleotide"
  source: /note="Description of Combined DNA/RNA Molecule: Synthetic oligonucleotide"
ccaguuucuuauguguauutt

SEQ ID NO: 1772 - DNA, 21 bp, Artificial Sequence
  source: /note="Description of Artificial Sequence: Synthetic oligonucleotide"
  source: /note="Description of Combined DNA/RNA Molecule: Synthetic oligonucleotide"
auguguauuuggaaguugutt

SEQ ID NO: 1773 - DNA, 21 bp, Artificial Sequence
  source: /note="Description of Artificial Sequence: Synthetic oligonucleotide"
  source: /note="Description of Combined DNA/RNA Molecule: Synthetic oligonucleotide"
ggaaguuguaucaaagcautt

SEQ ID NO: 1774 - DNA, 21 bp, Artificial Sequence
  source: /note="Description of Artificial Sequence: Synthetic oligonucleotide"
  source: /note="Description of Combined DNA/RNA Molecule: Synthetic oligonucleotide"
guaucaaagcauuuuucaatt

SEQ ID NO: 1775 - DNA, 21 bp, Artificial Sequence
  source: /note="Description of Artificial Sequence: Synthetic oligonucleotide"
  source: /note="Description of Combined DNA/RNA Molecule: Synthetic oligonucleotide"
uuuucaaaaucaaaaagaatt

SEQ ID NO: 1776 - DNA, 21 bp, Artificial Sequence
  source: /note="Description of Artificial Sequence: Synthetic oligonucleotide"
  source: /note="Description of Combined DNA/RNA Molecule: Synthetic oligonucleotide"
caaaaagaaugccaauaactt

SEQ ID NO: 1777 - DNA, 21 bp, Artificial Sequence
  source: /note="Description of Artificial Sequence: Synthetic oligonucleotide"
  source: /note="Description of Combined DNA/RNA Molecule: Synthetic oligonucleotide"
gccaauaaccuaugacaautt

SEQ ID NO: 1778 - DNA, 21 bp, Artificial Sequence
  source: /note="Description of Artificial Sequence: Synthetic oligonucleotide"
  source: /note="Description of Combined DNA/RNA Molecule: Synthetic oligonucleotide"
ccuaugacaauggauuucutt

SEQ ID NO: 1779 - DNA, 21 bp, Artificial Sequence
  source: /note="Description of Artificial Sequence: Synthetic oligonucleotide"
  source: /note="Description of Combined DNA/RNA Molecule: Synthetic oligonucleotide"
uggauuucucuucauucautt

SEQ ID NO: 1780 - DNA, 21 bp, Artificial Sequence
  source: /note="Description of Artificial Sequence: Synthetic oligonucleotide"
  source: /note="Description of Combined DNA/RNA Molecule: Synthetic oligonucleotide"
cauucauacagacaaaccutt

SEQ ID NO: 1781 - DNA, 21 bp, Artificial Sequence
  source: /note="Description of Artificial Sequence: Synthetic oligonucleotide"
  source: /note="Description of Combined DNA/RNA Molecule: Synthetic oligonucleotide"
cagacaaaccuguuuauactt

SEQ ID NO: 1782 - DNA, 21 bp, Artificial Sequence
  source: /note="Description of Artificial Sequence: Synthetic oligonucleotide"
  source: /note="Description of Combined DNA/RNA Molecule: Synthetic oligonucleotide"
guuuauacuccagaccagutt

SEQ ID NO: 1783 - DNA, 21 bp, Artificial Sequence
  source: /note="Description of Artificial Sequence: Synthetic oligonucleotide"
  source: /note="Description of Combined DNA/RNA Molecule: Synthetic oligonucleotide"
agaccagucaguaaaaguutt

SEQ ID NO: 1784 - DNA, 21 bp, Artificial Sequence
  source: /note="Description of Artificial Sequence: Synthetic oligonucleotide"
  source: /note="Description of Combined DNA/RNA Molecule: Synthetic oligonucleotide"
aguaaaaguuagaguuuautt

SEQ ID NO: 1785 - DNA, 21 bp, Artificial Sequence
  source: /note="Description of Artificial Sequence: Synthetic oligonucleotide"
  source: /note="Description of Combined DNA/RNA Molecule: Synthetic oligonucleotide"
agaguuuauucguugaaugtt

SEQ ID NO: 1786 - DNA, 21 bp, Artificial Sequence
  source: /note="Description of Artificial Sequence: Synthetic oligonucleotide"
  source: /note="Description of Combined DNA/RNA Molecule: Synthetic oligonucleotide"
cguugaaugacgacuugaatt

SEQ ID NO: 1787 - DNA, 21 bp, Artificial Sequence
  source: /note="Description of Artificial Sequence: Synthetic oligonucleotide"
  source: /note="Description of Combined DNA/RNA Molecule: Synthetic oligonucleotide"
cuugaagccagccaaaagatt

SEQ ID NO: 1788 - DNA, 21 bp, Artificial Sequence
  source: /note="Description of Artificial Sequence: Synthetic oligonucleotide"
  source: /note="Description of Combined DNA/RNA Molecule: Synthetic oligonucleotide"
ccagccaaaagagaaacugtt

SEQ ID NO: 1789 - DNA, 21 bp, Artificial Sequence
  source: /note="Description of Artificial Sequence: Synthetic oligonucleotide"
  source: /note="Description of Combined DNA/RNA Molecule: Synthetic oligonucleotide"
aaacugucuuaacuuucautt

SEQ ID NO: 1790 - DNA, 21 bp, Artificial Sequence
  source: /note="Description of Artificial Sequence: Synthetic oligonucleotide"
  source: /note="Description of Combined DNA/RNA Molecule: Synthetic oligonucleotide"
aacuuucauagauccugaatt

SEQ ID NO: 1791 - DNA, 21 bp, Artificial Sequence
  source: /note="Description of Artificial Sequence: Synthetic oligonucleotide"
  source: /note="Description of Combined DNA/RNA Molecule: Synthetic oligonucleotide"
cauagauccugaaggaucatt

SEQ ID NO: 1792 - DNA, 21 bp, Artificial Sequence
  source: /note="Description of Artificial Sequence: Synthetic oligonucleotide"
  source: /note="Description of Combined DNA/RNA Molecule: Synthetic oligonucleotide"
gaaggaucagaaguugacatt

SEQ ID NO: 1793 - DNA, 21 bp, Artificial Sequence
  source: /note="Description of Artificial Sequence: Synthetic oligonucleotide"
  source: /note="Description of Combined DNA/RNA Molecule: Synthetic oligonucleotide"
ugacaugguagaagaaauutt

SEQ ID NO: 1794 - DNA, 21 bp, Artificial Sequence
  source: /note="Description of Artificial Sequence: Synthetic oligonucleotide"
  source: /note="Description of Combined DNA/RNA Molecule: Synthetic oligonucleotide"
gaagaaauugaucauauugtt

SEQ ID NO: 1795 - DNA, 21 bp, Artificial Sequence
  source: /note="Description of Artificial Sequence: Synthetic oligonucleotide"
  source: /note="Description of Combined DNA/RNA Molecule: Synthetic oligonucleotide"
gaucauauuggaauuaucutt

SEQ ID NO: 1796 - DNA, 21 bp, Artificial Sequence
  source: /note="Description of Artificial Sequence: Synthetic oligonucleotide"
  source: /note="Description of Combined DNA/RNA Molecule: Synthetic oligonucleotide"
ggaauuaucucuuuuccugtt

SEQ ID NO: 1797 - DNA, 21 bp, Artificial Sequence
  source: /note="Description of Artificial Sequence: Synthetic oligonucleotide"
  source: /note="Description of Combined DNA/RNA Molecule: Synthetic oligonucleotide"
cucuuuuccugacuucaagtt

SEQ ID NO: 1798 - DNA, 21 bp, Artificial Sequence
  source: /note="Description of Artificial Sequence: Synthetic oligonucleotide"
  source: /note="Description of Combined DNA/RNA Molecule: Synthetic oligonucleotide"
acuucaagauuccgucuaatt

SEQ ID NO: 1799 - DNA, 21 bp, Artificial Sequence
  source: /note="Description of Artificial Sequence: Synthetic oligonucleotide"
  source: /note="Description of Combined DNA/RNA Molecule: Synthetic oligonucleotide"
ccgucuaauccuagauaugtt

SEQ ID NO: 1800 - DNA, 21 bp, Artificial Sequence
  source: /note="Description of Artificial Sequence: Synthetic oligonucleotide"
  source: /note="Description of Combined DNA/RNA Molecule: Synthetic oligonucleotide"
ccuagauaugguauguggatt

SEQ ID NO: 1801 - DNA, 21 bp, Artificial Sequence
  source: /note="Description of Artificial Sequence: Synthetic oligonucleotide"
  source: /note="Description of Combined DNA/RNA Molecule: Synthetic oligonucleotide"
uguggacgaucaaggcuaatt

SEQ ID NO: 1802 - DNA, 21 bp, Artificial Sequence
  source: /note="Description of Artificial Sequence: Synthetic oligonucleotide"
  source: /note="Description of Combined DNA/RNA Molecule: Synthetic oligonucleotide"
cgaucaaggcuaaauauaatt

SEQ ID NO: 1803 - DNA, 21 bp, Artificial Sequence
  source: /note="Description of Artificial Sequence: Synthetic oligonucleotide"
  source: /note="Description of Combined DNA/RNA Molecule: Synthetic oligonucleotide"
auauaaagaggacuuuucatt

SEQ ID NO: 1804 - DNA, 21 bp, Artificial Sequence
  source: /note="Description of Artificial Sequence: Synthetic oligonucleotide"
  source: /note="Description of Combined DNA/RNA Molecule: Synthetic oligonucleotide"
gaggacuuuucaacaacugtt

SEQ ID NO: 1805 - DNA, 21 bp, Artificial Sequence
  source: /note="Description of Artificial Sequence: Synthetic oligonucleotide"
  source: /note="Description of Combined DNA/RNA Molecule: Synthetic oligonucleotide"
caacuggaaccgcauauuutt

SEQ ID NO: 1806 - DNA, 21 bp, Artificial Sequence
  source: /note="Description of Artificial Sequence: Synthetic oligonucleotide"
  source: /note="Description of Combined DNA/RNA Molecule: Synthetic oligonucleotide"
cgcauauuuugaaguuaaatt

SEQ ID NO: 1807 - DNA, 21 bp, Artificial Sequence
  source: /note="Description of Artificial Sequence: Synthetic oligonucleotide"
  source: /note="Description of Combined DNA/RNA Molecule: Synthetic oligonucleotide"
aaguuaaagaauaugucuutt

SEQ ID NO: 1808 - DNA, 21 bp, Artificial Sequence
  source: /note="Description of Artificial Sequence: Synthetic oligonucleotide"
  source: /note="Description of Combined DNA/RNA Molecule: Synthetic oligonucleotide"
gaauaugucuugccacauutt

SEQ ID NO: 1809 - DNA, 21 bp, Artificial Sequence
  source: /note="Description of Artificial Sequence: Synthetic oligonucleotide"
  source: /note="Description of Combined DNA/RNA Molecule: Synthetic oligonucleotide"
ccacauuuuucugucucaatt

SEQ ID NO: 1810 - DNA, 21 bp, Artificial Sequence
  source: /note="Description of Artificial Sequence: Synthetic oligonucleotide"
  source: /note="Description of Combined DNA/RNA Molecule: Synthetic oligonucleotide"
cugucucaaucgagccagatt

SEQ ID NO: 1811 - DNA, 21 bp, Artificial Sequence
  source: /note="Description of Artificial Sequence: Synthetic oligonucleotide"
  source: /note="Description of Combined DNA/RNA Molecule: Synthetic oligonucleotide"
caaucgagccagaauauaatt

SEQ ID NO: 1812 - DNA, 21 bp, Artificial Sequence
  source: /note="Description of Artificial Sequence: Synthetic oligonucleotide"
  source: /note="Description of Combined DNA/RNA Molecule: Synthetic oligonucleotide"
gaauauaauuucauugguutt

SEQ ID NO: 1813 - DNA, 21 bp, Artificial Sequence
  source: /note="Description of Artificial Sequence: Synthetic oligonucleotide"
  source: /note="Description of Combined DNA/RNA Molecule: Synthetic oligonucleotide"
auugguuacaagaacuuuatt

SEQ ID NO: 1814 - DNA, 21 bp, Artificial Sequence
  source: /note="Description of Artificial Sequence: Synthetic oligonucleotide"
  source: /note="Description of Combined DNA/RNA Molecule: Synthetic oligonucleotide"
agaacuuuaagaauuuugatt

SEQ ID NO: 1815 - DNA, 21 bp, Artificial Sequence
  source: /note="Description of Artificial Sequence: Synthetic oligonucleotide"
  source: /note="Description of Combined DNA/RNA Molecule: Synthetic oligonucleotide"
gaauuuugaaauuacuauatt

SEQ ID NO: 1816 - DNA, 21 bp, Artificial Sequence
  source: /note="Description of Artificial Sequence: Synthetic oligonucleotide"
  source: /note="Description of Combined DNA/RNA Molecule: Synthetic oligonucleotide"
gaaauuacuauaaaagcaatt

SEQ ID NO: 1817 - DNA, 21 bp, Artificial Sequence
  source: /note="Description of Artificial Sequence: Synthetic oligonucleotide"
  source: /note="Description of Combined DNA/RNA Molecule: Synthetic oligonucleotide"
aaagcaagauauuuuuauatt

SEQ ID NO: 1818 - DNA, 21 bp, Artificial Sequence
  source: /note="Description of Artificial Sequence: Synthetic oligonucleotide"
  source: /note="Description of Combined DNA/RNA Molecule: Synthetic oligonucleotide"
auauuuuuauaauaaaguatt

SEQ ID NO: 1819 - DNA, 21 bp, Artificial Sequence
  source: /note="Description of Artificial Sequence: Synthetic oligonucleotide"
  source: /note="Description of Combined DNA/RNA Molecule: Synthetic oligonucleotide"
aaguagucacugaggcugatt

SEQ ID NO: 1820 - DNA, 21 bp, Artificial Sequence
  source: /note="Description of Artificial Sequence: Synthetic oligonucleotide"
  source: /note="Description of Combined DNA/RNA Molecule: Synthetic oligonucleotide"
cacugaggcugacguuuautt

SEQ ID NO: 1821 - DNA, 21 bp, Artificial Sequence
  source: /note="Description of Artificial Sequence: Synthetic oligonucleotide"
  source: /note="Description of Combined DNA/RNA Molecule: Synthetic oligonucleotide"
cguuuauaucacauuuggatt

SEQ ID NO: 1822 - DNA, 21 bp, Artificial Sequence
  source: /note="Description of Artificial Sequence: Synthetic oligonucleotide"
  source: /note="Description of Combined DNA/RNA Molecule: Synthetic oligonucleotide"
cacauuuggaauaagagaatt

SEQ ID NO: 1823 - DNA, 21 bp, Artificial Sequence
  source: /note="Description of Artificial Sequence: Synthetic oligonucleotide"
  source: /note="Description of Combined DNA/RNA Molecule: Synthetic oligonucleotide"
aauaagagaagacuuaaaatt

SEQ ID NO: 1824 - DNA, 21 bp, Artificial Sequence
  source: /note="Description of Artificial Sequence: Synthetic oligonucleotide"
  source: /note="Description of Combined DNA/RNA Molecule: Synthetic oligonucleotide"
cuuaaaagaugaucaaaaatt

SEQ ID NO: 1825 - DNA, 21 bp, Artificial Sequence
  source: /note="Description of Artificial Sequence: Synthetic oligonucleotide"
  source: /note="Description of Combined DNA/RNA Molecule: Synthetic oligonucleotide"
gaugaucaaaaagaaaugatt

SEQ ID NO: 1826 - DNA, 21 bp, Artificial Sequence
  source: /note="Description of Artificial Sequence: Synthetic oligonucleotide"
  source: /note="Description of Combined DNA/RNA Molecule: Synthetic oligonucleotide"
aaaugaugcaaacagcaautt

SEQ ID NO: 1827 - DNA, 21 bp, Artificial Sequence
  source: /note="Description of Artificial Sequence: Synthetic oligonucleotide"
  source: /note="Description of Combined DNA/RNA Molecule: Synthetic oligonucleotide"
acagcaaugcaaaacacaatt

SEQ ID NO: 1828 - DNA, 21 bp, Artificial Sequence
  source: /note="Description of Artificial Sequence: Synthetic oligonucleotide"
  source: /note="Description of Combined DNA/RNA Molecule: Synthetic oligonucleotide"
aaaacacaauguugauaaatt

SEQ ID NO: 1829 - DNA, 21 bp, Artificial Sequence
  source: /note="Description of Artificial Sequence: Synthetic oligonucleotide"
  source: /note="Description of Combined DNA/RNA Molecule: Synthetic oligonucleotide"
caauguugauaaauggaautt

SEQ ID NO: 1830 - DNA, 21 bp, Artificial Sequence
  source: /note="Description of Artificial Sequence: Synthetic oligonucleotide"
  source: /note="Description of Combined DNA/RNA Molecule: Synthetic oligonucleotide"
ggaauugcucaagucacautt

SEQ ID NO: 1831 - DNA, 21 bp, Artificial Sequence
  source: /note="Description of Artificial Sequence: Synthetic oligonucleotide"
  source: /note="Description of Combined DNA/RNA Molecule: Synthetic oligonucleotide"
gcucaagucacauuugauutt

SEQ ID NO: 1832 - DNA, 21 bp, Artificial Sequence
  source: /note="Description of Artificial Sequence: Synthetic oligonucleotide"
  source: /note="Description of Combined DNA/RNA Molecule: Synthetic oligonucleotide"
auuugauucugaaacagcatt

SEQ ID NO: 1833 - DNA, 21 bp, Artificial Sequence
  source: /note="Description of Artificial Sequence: Synthetic oligonucleotide"
  source: /note="Description of Combined DNA/RNA Molecule: Synthetic oligonucleotide"
ugaaacagcagucaaagaatt

SEQ ID NO: 1834 - DNA, 21 bp, Artificial Sequence
  source: /note="Description of Artificial Sequence: Synthetic oligonucleotide"
  source: /note="Description of Combined DNA/RNA Molecule: Synthetic oligonucleotide"
caaagaacugucauacuactt

SEQ ID NO: 1835 - DNA, 21 bp, Artificial Sequence
  source: /note="Description of Artificial Sequence: Synthetic oligonucleotide"
  source: /note="Description of Combined DNA/RNA Molecule: Synthetic oligonucleotide"
cauacuacaguuuagaagatt

SEQ ID NO: 1836 - DNA, 21 bp, Artificial Sequence
  source: /note="Description of Artificial Sequence: Synthetic oligonucleotide"
  source: /note="Description of Combined DNA/RNA Molecule: Synthetic oligonucleotide"
caguuuagaagauuuaaactt

SEQ ID NO: 1837 - DNA, 21 bp, Artificial Sequence
  source: /note="Description of Artificial Sequence: Synthetic oligonucleotide"
  source: /note="Description of Combined DNA/RNA Molecule: Synthetic oligonucleotide"
uaaacaacaaguaccuuuatt

SEQ ID NO: 1838 - DNA, 21 bp, Artificial Sequence
  source: /note="Description of Artificial Sequence: Synthetic oligonucleotide"
  source: /note="Description of Combined DNA/RNA Molecule: Synthetic oligonucleotide"
caaguaccuuuauauugcutt

SEQ ID NO: 1839 - DNA, 21 bp, Artificial Sequence
  source: /note="Description of Artificial Sequence: Synthetic oligonucleotide"
  source: /note="Description of Combined DNA/RNA Molecule: Synthetic oligonucleotide"
uauugcuguaacagucauatt

SEQ ID NO: 1840 - DNA, 21 bp, Artificial Sequence
  source: /note="Description of Artificial Sequence: Synthetic oligonucleotide"
  source: /note="Description of Combined DNA/RNA Molecule: Synthetic oligonucleotide"
aacagucauagagucuacatt

SEQ ID NO: 1841 - DNA, 21 bp, Artificial Sequence
  source: /note="Description of Artificial Sequence: Synthetic oligonucleotide"
  source: /note="Description of Combined DNA/RNA Molecule: Synthetic oligonucleotide"
agagucuacagguggauuutt

SEQ ID NO: 1842 - DNA, 21 bp, Artificial Sequence
  source: /note="Description of Artificial Sequence: Synthetic oligonucleotide"
  source: /note="Description of Combined DNA/RNA Molecule: Synthetic oligonucleotide"
ggauuuucugaagaggcagtt

SEQ ID NO: 1843 - DNA, 21 bp, Artificial Sequence
  source: /note="Description of Artificial Sequence: Synthetic oligonucleotide"
  source: /note="Description of Combined DNA/RNA Molecule: Synthetic oligonucleotide"
gaagaggcagaaauaccugtt

SEQ ID NO: 1844 - DNA, 21 bp, Artificial Sequence
  source: /note="Description of Artificial Sequence: Synthetic oligonucleotide"
  source: /note="Description of Combined DNA/RNA Molecule: Synthetic oligonucleotide"
agaaauaccuggcaucaaatt

SEQ ID NO: 1845 - DNA, 21 bp, Artificial Sequence
  source: /note="Description of Artificial Sequence: Synthetic oligonucleotide"
  source: /note="Description of Combined DNA/RNA Molecule: Synthetic oligonucleotide"
gcaucaaauauguccucuctt

SEQ ID NO: 1846 - DNA, 21 bp, Artificial Sequence
  source: /note="Description of Artificial Sequence: Synthetic oligonucleotide"
  source: /note="Description of Combined DNA/RNA Molecule: Synthetic oligonucleotide"
uguccucucucccuacaaatt

SEQ ID NO: 1847 - DNA, 21 bp, Artificial Sequence
  source: /note="Description of Artificial Sequence: Synthetic oligonucleotide"
  source: /note="Description of Combined DNA/RNA Molecule: Synthetic oligonucleotide"
gaauuugguugcuacuccutt

SEQ ID NO: 1848 - DNA, 21 bp, Artificial Sequence
  source: /note="Description of Artificial Sequence: Synthetic oligonucleotide"
  source: /note="Description of Combined DNA/RNA Molecule: Synthetic oligonucleotide"
gcuacuccucuuuuccugatt

SEQ ID NO: 1849 - DNA, 21 bp, Artificial Sequence
  source: /note="Description of Artificial Sequence: Synthetic oligonucleotide"
  source: /note="Description of Combined DNA/RNA Molecule: Synthetic oligonucleotide"
cucuuuuccugaagccuggtt

SEQ ID NO: 1850 - DNA, 21 bp, Artificial Sequence
  source: /note="Description of Artificial Sequence: Synthetic oligonucleotide"
  source: /note="Description of Combined DNA/RNA Molecule: Synthetic oligonucleotide"
ccugggauuccauaucccatt

SEQ ID NO: 1851 - DNA, 21 bp, Artificial Sequence
  source: /note="Description of Artificial Sequence: Synthetic oligonucleotide"
  source: /note="Description of Combined DNA/RNA Molecule: Synthetic oligonucleotide"
cauaucccaucaaggugcatt

SEQ ID NO: 1852 - DNA, 21 bp, Artificial Sequence
  source: /note="Description of Artificial Sequence: Synthetic oligonucleotide"
  source: /note="Description of Combined DNA/RNA Molecule: Synthetic oligonucleotide"
ccaucaaggugcagguuaatt

SEQ ID NO: 1853 - DNA, 21 bp, Artificial Sequence
  source: /note="Description of Artificial Sequence: Synthetic oligonucleotide"
  source: /note="Description of Combined DNA/RNA Molecule: Synthetic oligonucleotide"
cagguuaaagauucgcuugtt

SEQ ID NO: 1854 - DNA, 21 bp, Artificial Sequence
  source: /note="Description of Artificial Sequence: Synthetic oligonucleotide"
  source: /note="Description of Combined DNA/RNA Molecule: Synthetic oligonucleotide"
uucgcuugaccaguugguatt

SEQ ID NO: 1855 - DNA, 21 bp, Artificial Sequence
  source: /note="Description of Artificial Sequence: Synthetic oligonucleotide"
  source: /note="Description of Combined DNA/RNA Molecule: Synthetic oligonucleotide"
ccaguugguaggaggaguctt

SEQ ID NO: 1856 - DNA, 21 bp, Artificial Sequence
  source: /note="Description of Artificial Sequence: Synthetic oligonucleotide"
  source: /note="Description of Combined DNA/RNA Molecule: Synthetic oligonucleotide"
ggaggagucccaguaacactt

SEQ ID NO: 1857 - DNA, 21 bp, Artificial Sequence
  source: /note="Description of Artificial Sequence: Synthetic oligonucleotide"
  source: /note="Description of Combined DNA/RNA Molecule: Synthetic oligonucleotide"
caguaacacugaaugcacatt

SEQ ID NO: 1858 - DNA, 21 bp, Artificial Sequence
  source: /note="Description of Artificial Sequence: Synthetic oligonucleotide"
  source: /note="Description of Combined DNA/RNA Molecule: Synthetic oligonucleotide"
gaaugcacaaacaauugautt

SEQ ID NO: 1859 - DNA, 21 bp, Artificial Sequence
  source: /note="Description of Artificial Sequence: Synthetic oligonucleotide"
  source: /note="Description of Combined DNA/RNA Molecule: Synthetic oligonucleotide"
aacaauugauguaaaccaatt

SEQ ID NO: 1860 - DNA, 21 bp, Artificial Sequence
  source: /note="Description of Artificial Sequence: Synthetic oligonucleotide"
  source: /note="Description of Combined DNA/RNA Molecule: Synthetic oligonucleotide"
uaaaccaagagacaucugatt

SEQ ID NO: 1861 - DNA, 21 bp, Artificial Sequence
  source: /note="Description of Artificial Sequence: Synthetic oligonucleotide"
  source: /note="Description of Combined DNA/RNA Molecule: Synthetic oligonucleotide"
caucugacuuggauccaagtt

SEQ ID NO: 1862 - DNA, 21 bp, Artificial Sequence
  source: /note="Description of Artificial Sequence: Synthetic oligonucleotide"
  source: /note="Description of Combined DNA/RNA Molecule: Synthetic oligonucleotide"
gauccaagcaaaaguguaatt

SEQ ID NO: 1863 - DNA, 21 bp, Artificial Sequence
  source: /note="Description of Artificial Sequence: Synthetic oligonucleotide"
  source: /note="Description of Combined DNA/RNA Molecule: Synthetic oligonucleotide"
caaaaguguaacacguguutt

SEQ ID NO: 1864 - DNA, 21 bp, Artificial Sequence
  source: /note="Description of Artificial Sequence: Synthetic oligonucleotide"
  source: /note="Description of Combined DNA/RNA Molecule: Synthetic oligonucleotide"
aacacguguugaugauggatt

SEQ ID NO: 1865 - DNA, 21 bp, Artificial Sequence
  source: /note="Description of Artificial Sequence: Synthetic oligonucleotide"
  source: /note="Description of Combined DNA/RNA Molecule: Synthetic oligonucleotide"
ugauggaguagcuuccuuutt

SEQ ID NO: 1866 - DNA, 21 bp, Artificial Sequence
  source: /note="Description of Artificial Sequence: Synthetic oligonucleotide"
  source: /note="Description of Combined DNA/RNA Molecule: Synthetic oligonucleotide"
guagcuuccuuugugcuuatt

SEQ ID NO: 1867 - DNA, 21 bp, Artificial Sequence
  source: /note="Description of Artificial Sequence: Synthetic oligonucleotide"
  source: /note="Description of Combined DNA/RNA Molecule: Synthetic oligonucleotide"
gcuuaaucucccaucuggatt

SEQ ID NO: 1868 - DNA, 21 bp, Artificial Sequence
  source: /note="Description of Artificial Sequence: Synthetic oligonucleotide"
  source: /note="Description of Combined DNA/RNA Molecule: Synthetic oligonucleotide"
ccaucuggagugacggugctt

SEQ ID NO: 1869 - DNA, 21 bp, Artificial Sequence
  source: /note="Description of Artificial Sequence: Synthetic oligonucleotide"
  source: /note="Description of Combined DNA/RNA Molecule: Synthetic oligonucleotide"
ugacggugcuggaguuuaatt

SEQ ID NO: 1870 - DNA, 21 bp, Artificial Sequence
  source: /note="Description of Artificial Sequence: Synthetic oligonucleotide"
  source: /note="Description of Combined DNA/RNA Molecule: Synthetic oligonucleotide"
gcuggaguuuaaugucaaatt

SEQ ID NO: 1871 - DNA, 21 bp, Artificial Sequence
  source: /note="Description of Artificial Sequence: Synthetic oligonucleotide"
  source: /note="Description of Combined DNA/RNA Molecule: Synthetic oligonucleotide"
ugucaaaacugaugcuccatt

SEQ ID NO: 1872 - DNA, 21 bp, Artificial Sequence
  source: /note="Description of Artificial Sequence: Synthetic oligonucleotide"
  source: /note="Description of Combined DNA/RNA Molecule: Synthetic oligonucleotide"
gaugcuccagaucuuccagtt

SEQ ID NO: 1873 - DNA, 21 bp, Artificial Sequence
  source: /note="Description of Artificial Sequence: Synthetic oligonucleotide"
  source: /note="Description of Combined DNA/RNA Molecule: Synthetic oligonucleotide"
cagaucuuccagaagaaaatt

SEQ ID NO: 1874 - DNA, 21 bp, Artificial Sequence
  source: /note="Description of Artificial Sequence: Synthetic oligonucleotide"
  source: /note="Description of Combined DNA/RNA Molecule: Synthetic oligonucleotide"
agaaaaucaggccagggaatt

SEQ ID NO: 1875 - DNA, 21 bp, Artificial Sequence
  source: /note="Description of Artificial Sequence: Synthetic oligonucleotide"
  source: /note="Description of Combined DNA/RNA Molecule: Synthetic oligonucleotide"
ggccagggaagguuaccgatt

SEQ ID NO: 1876 - DNA, 21 bp, Artificial Sequence
  source: /note="Description of Artificial Sequence: Synthetic oligonucleotide"
  source: /note="Description of Combined DNA/RNA Molecule: Synthetic oligonucleotide"
guuaccgagcaauagcauatt

SEQ ID NO: 1877 - DNA, 21 bp, Artificial Sequence
  source: /note="Description of Artificial Sequence: Synthetic oligonucleotide"
  source: /note="Description of Combined DNA/RNA Molecule: Synthetic oligonucleotide"
auagcauacucaucucucatt

SEQ ID NO: 1878 - DNA, 21 bp, Artificial Sequence
  source: /note="Description of Artificial Sequence: Synthetic oligonucleotide"
  source: /note="Description of Combined DNA/RNA Molecule: Synthetic oligonucleotide"
uacucaucucucagccaaatt

SEQ ID NO: 1879 - DNA, 21 bp, Artificial Sequence
  source: /note="Description of Artificial Sequence: Synthetic oligonucleotide"
  source: /note="Description of Combined DNA/RNA Molecule: Synthetic oligonucleotide"
gccaaaguuaccuuuauautt

SEQ ID NO: 1880 - DNA, 21 bp, Artificial Sequence
  source: /note="Description of Artificial Sequence: Synthetic oligonucleotide"
  source: /note="Description of Combined DNA/RNA Molecule: Synthetic oligonucleotide"
ccuuuauauugauuggacutt

SEQ ID NO: 1881 - DNA, 21 bp, Artificial Sequence
  source: /note="Description of Artificial Sequence: Synthetic oligonucleotide"
  source: /note="Description of Combined DNA/RNA Molecule: Synthetic oligonucleotide"
gauuggacugauaaccauatt

SEQ ID NO: 1882 - DNA, 21 bp, Artificial Sequence
  source: /note="Description of Artificial Sequence: Synthetic oligonucleotide"
  source: /note="Description of Combined DNA/RNA Molecule: Synthetic oligonucleotide"
cugauaaccauaaggcuuutt

SEQ ID NO: 1883 - DNA, 21 bp, Artificial Sequence
  source: /note="Description of Artificial Sequence: Synthetic oligonucleotide"
  source: /note="Description of Combined DNA/RNA Molecule: Synthetic oligonucleotide"
aggcuuugcuagugggagatt

SEQ ID NO: 1884 - DNA, 21 bp, Artificial Sequence
  source: /note="Description of Artificial Sequence: Synthetic oligonucleotide"
  source: /note="Description of Combined DNA/RNA Molecule: Synthetic oligonucleotide"
gugggagaacaucugaauatt

SEQ ID NO: 1885 - DNA, 21 bp, Artificial Sequence
  source: /note="Description of Artificial Sequence: Synthetic oligonucleotide"
  source: /note="Description of Combined DNA/RNA Molecule: Synthetic oligonucleotide"
caucugaauauuauuguuatt

SEQ ID NO: 1886 - DNA, 21 bp, Artificial Sequence
  source: /note="Description of Artificial Sequence: Synthetic oligonucleotide"
  source: /note="Description of Combined DNA/RNA Molecule: Synthetic oligonucleotide"
uauuauuguuacccccaaatt

SEQ ID NO: 1887 - DNA, 21 bp, Artificial Sequence
  source: /note="Description of Artificial Sequence: Synthetic oligonucleotide"
  source: /note="Description of Combined DNA/RNA Molecule: Synthetic oligonucleotide"
cccaaaagcccauauauugtt

SEQ ID NO: 1888 - DNA, 21 bp, Artificial Sequence
  source: /note="Description of Artificial Sequence: Synthetic oligonucleotide"
  source: /note="Description of Combined DNA/RNA Molecule: Synthetic oligonucleotide"
ccaaaagcccauauauugatt

SEQ ID NO: 1889 - DNA, 21 bp, Artificial Sequence
  source: /note="Description of Artificial Sequence: Synthetic oligonucleotide"
  source: /note="Description of Combined DNA/RNA Molecule: Synthetic oligonucleotide"
caaaagcccauauauugactt

SEQ ID NO: 1890 - DNA, 21 bp, Artificial Sequence
  source: /note="Description of Artificial Sequence: Synthetic oligonucleotide"
  source: /note="Description of Combined DNA/RNA Molecule: Synthetic oligonucleotide"
aaaagcccauauauugacatt

SEQ ID NO: 1891 - DNA, 21 bp, Artificial Sequence
  source: /note="Description of Artificial Sequence: Synthetic oligonucleotide"
  source: /note="Description of Combined DNA/RNA Molecule: Synthetic oligonucleotide"
aaagcccauauauugacaatt

SEQ ID NO: 1892 - DNA, 21 bp, Artificial Sequence
  source: /note="Description of Artificial Sequence: Synthetic oligonucleotide"
  source: /note="Description of Combined DNA/RNA Molecule: Synthetic oligonucleotide"
aagcccauauauugacaaatt

SEQ ID NO: 1893 - DNA, 21 bp, Artificial Sequence
  source: /note="Description of Artificial Sequence: Synthetic oligonucleotide"
  source: /note="Description of Combined DNA/RNA Molecule: Synthetic oligonucleotide"
agcccauauauugacaaaatt

SEQ ID NO: 1894 - DNA, 21 bp, Artificial Sequence
  source: /note="Description of Artificial Sequence: Synthetic oligonucleotide"
  source: /note="Description of Combined DNA/RNA Molecule: Synthetic oligonucleotide"
gcccauauauugacaaaautt

SEQ ID NO: 1895 - DNA, 21 bp, Artificial Sequence
  source: /note="Description of Artificial Sequence: Synthetic oligonucleotide"
  source: /note="Description of Combined DNA/RNA Molecule: Synthetic oligonucleotide"
cccauauauugacaaaauatt

SEQ ID NO: 1896 - DNA, 21 bp, Artificial Sequence
  source: /note="Description of Artificial Sequence: Synthetic oligonucleotide"
  source: /note="Description of Combined DNA/RNA Molecule: Synthetic oligonucleotide"
ccauauauugacaaaauaatt

SEQ ID NO: 1897 - DNA, 21 bp, Artificial Sequence
  source: /note="Description of Artificial Sequence: Synthetic oligonucleotide"
  source: /note="Description of Combined DNA/RNA Molecule: Synthetic oligonucleotide"
cauauauugacaaaauaactt

SEQ ID NO: 1898 - DNA, 21 bp, Artificial Sequence
  source: /note="Description of Artificial Sequence: Synthetic oligonucleotide"
  source: /note="Description of Combined DNA/RNA Molecule: Synthetic oligonucleotide"
auauauugacaaaauaacutt

SEQ ID NO: 1899 - DNA, 21 bp, Artificial Sequence
  source: /note="Description of Artificial Sequence: Synthetic oligonucleotide"
  source: /note="Description of Combined DNA/RNA Molecule: Synthetic oligonucleotide"
uauauugacaaaauaacuctt

SEQ ID NO: 1900 - DNA, 21 bp, Artificial Sequence
  source: /note="Description of Artificial Sequence: Synthetic oligonucleotide"
  source: /note="Description of Combined DNA/RNA Molecule: Synthetic oligonucleotide"
auauugacaaaauaacucatt

SEQ ID NO: 1901 - DNA, 21 bp, Artificial Sequence
  source: /note="Description of Artificial Sequence: Synthetic oligonucleotide"
  source: /note="Description of Combined DNA/RNA Molecule: Synthetic oligonucleotide"
uauugacaaaauaacucactt

SEQ ID NO: 1902 - DNA, 21 bp, Artificial Sequence
  source: /note="Description of Artificial Sequence: Synthetic oligonucleotide"
  source: /note="Description of Combined DNA/RNA Molecule: Synthetic oligonucleotide"
auugacaaaauaacucacutt

SEQ ID NO: 1903 - DNA, 21 bp, Artificial Sequence
  source: /note="Description of Artificial Sequence: Synthetic oligonucleotide"
  source: /note="Description of Combined DNA/RNA Molecule: Synthetic oligonucleotide"
uugacaaaauaacucacuatt

SEQ ID NO: 1904 - DNA, 21 bp, Artificial Sequence
  source: /note="Description of Artificial Sequence: Synthetic oligonucleotide"
  source: /note="Description of Combined DNA/RNA Molecule: Synthetic oligonucleotide"
ugacaaaauaacucacuautt

SEQ ID NO: 1905 - DNA, 21 bp, Artificial Sequence
  source: /note="Description of Artificial Sequence: Synthetic oligonucleotide"
  source: /note="Description of Combined DNA/RNA Molecule: Synthetic oligonucleotide"
gacaaaauaacucacuauatt

SEQ ID NO: 1906 - DNA, 21 bp, Artificial Sequence
  source: /note="Description of Artificial Sequence: Synthetic oligonucleotide"
  source: /note="Description of Combined DNA/RNA Molecule: Synthetic oligonucleotide"
aaaauaacucacuauaauutt

SEQ ID NO: 1907 - DNA, 21 bp, Artificial Sequence
  source: /note="Description of Artificial Sequence: Synthetic oligonucleotide"
  source: /note="Description of Combined DNA/RNA Molecule: Synthetic oligonucleotide"
aaauaacucacuauaauuatt

SEQ ID NO: 1908 - DNA, 21 bp, Artificial Sequence
  source: /note="Description of Artificial Sequence: Synthetic oligonucleotide"
  source: /note="Description of Combined DNA/RNA Molecule: Synthetic oligonucleotide"
aauaacucacuauaauuactt

SEQ ID NO: 1909 - DNA, 21 bp, Artificial Sequence
  source: /note="Description of Artificial Sequence: Synthetic oligonucleotide"
  source: /note="Description of Combined DNA/RNA Molecule: Synthetic oligonucleotide"
auaacucacuauaauuacutt

SEQ ID NO: 1910 - DNA, 21 bp, Artificial Sequence
  source: /note="Description of Artificial Sequence: Synthetic oligonucleotide"
  source: /note="Description of Combined DNA/RNA Molecule: Synthetic oligonucleotide"
aacucacuauaauuacuugtt

SEQ ID NO: 1911 - DNA, 21 bp, Artificial Sequence
  source: /note="Description of Artificial Sequence: Synthetic oligonucleotide"
  source: /note="Description of Combined DNA/RNA Molecule: Synthetic oligonucleotide"
acucacuauaauuacuugatt

SEQ ID NO: 1912 - DNA, 21 bp, Artificial Sequence
  source: /note="Description of Artificial Sequence: Synthetic oligonucleotide"
  source: /note="Description of Combined DNA/RNA Molecule: Synthetic oligonucleotide"
cucacuauaauuacuugautt

SEQ ID NO: 1913 - DNA, 21 bp, Artificial Sequence
  source: /note="Description of Artificial Sequence: Synthetic oligonucleotide"
  source: /note="Description of Combined DNA/RNA Molecule: Synthetic oligonucleotide"
ucacuauaauuacuugauutt

SEQ ID NO: 1914 - DNA, 21 bp, Artificial Sequence
  source: /note="Description of Artificial Sequence: Synthetic oligonucleotide"
  source: /note="Description of Combined DNA/RNA Molecule: Synthetic oligonucleotide"
acuauaauuacuugauuuutt

SEQ ID NO: 1915 - DNA, 21 bp, Artificial Sequence
  source: /note="Description of Artificial Sequence: Synthetic oligonucleotide"
  source: /note="Description of Combined DNA/RNA Molecule: Synthetic oligonucleotide"
cuauaauuacuugauuuuatt

SEQ ID NO: 1916 - DNA, 21 bp, Artificial Sequence
  source: /note="Description of Artificial Sequence: Synthetic oligonucleotide"
  source: /note="Description of Combined DNA/RNA Molecule: Synthetic oligonucleotide"
uauaauuacuugauuuuautt

SEQ ID NO: 1917 - DNA, 21 bp, Artificial Sequence
  source: /note="Description of Artificial Sequence: Synthetic oligonucleotide"
  source: /note="Description of Combined DNA/RNA Molecule: Synthetic oligonucleotide"
auaauuacuugauuuuauctt

SEQ ID NO: 1918 - DNA, 21 bp, Artificial Sequence
  source: /note="Description of Artificial Sequence: Synthetic oligonucleotide"
  source: /note="Description of Combined DNA/RNA Molecule: Synthetic oligonucleotide"
uaauuacuugauuuuaucctt

SEQ ID NO: 1919 - DNA, 21 bp, Artificial Sequence
  source: /note="Description of Artificial Sequence: Synthetic oligonucleotide"
  source: /note="Description of Combined DNA/RNA Molecule: Synthetic oligonucleotide"
aauuacuugauuuuauccatt

SEQ ID NO: 1920 - DNA, 21 bp, Artificial Sequence
  source: /note="Description of Artificial Sequence: Synthetic oligonucleotide"
  source: /note="Description of Combined DNA/RNA Molecule: Synthetic oligonucleotide"
auuacuugauuuuauccaatt

SEQ ID NO: 1921 - DNA, 21 bp, Artificial Sequence
  source: /note="Description of Artificial Sequence: Synthetic oligonucleotide"
  source: /note="Description of Combined DNA/RNA Molecule: Synthetic oligonucleotide"
uuauccaagggcaaaauuatt

SEQ ID NO: 1922 - DNA, 21 bp, Artificial Sequence
  source: /note="Description of Artificial Sequence: Synthetic oligonucleotide"
  source: /note="Description of Combined DNA/RNA Molecule: Synthetic oligonucleotide"
gcaaaauuauccacuuuggtt

SEQ ID NO: 1923 - DNA, 21 bp, Artificial Sequence
  source: /note="Description of Artificial Sequence: Synthetic oligonucleotide"
  source: /note="Description of Combined DNA/RNA Molecule: Synthetic oligonucleotide"
cacuuuggcacgagggagatt

SEQ ID NO: 1924 - DNA, 21 bp, Artificial Sequence
  source: /note="Description of Artificial Sequence: Synthetic oligonucleotide"
  source: /note="Description of Combined DNA/RNA Molecule: Synthetic oligonucleotide"
cgagggagaaauuuucagatt

SEQ ID NO: 1925 - DNA, 21 bp, Artificial Sequence
  source: /note="Description of Artificial Sequence: Synthetic oligonucleotide"
  source: /note="Description of Combined DNA/RNA Molecule: Synthetic oligonucleotide"
auuuucagaugcaucuuautt

SEQ ID NO: 1926 - DNA, 21 bp, Artificial Sequence
  source: /note="Description of Artificial Sequence: Synthetic oligonucleotide"
  source: /note="Description of Combined DNA/RNA Molecule: Synthetic oligonucleotide"
gcaucuuaucaaaguauaatt

SEQ ID NO: 1927 - DNA, 21 bp, Artificial Sequence
  source: /note="Description of Artificial Sequence: Synthetic oligonucleotide"
  source: /note="Description of Combined DNA/RNA Molecule: Synthetic oligonucleotide"
caaaguauaaacauuccagtt

SEQ ID NO: 1928 - DNA, 21 bp, Artificial Sequence
  source: /note="Description of Artificial Sequence: Synthetic oligonucleotide"
  source: /note="Description of Combined DNA/RNA Molecule: Synthetic oligonucleotide"
auuccaguaacacagaacatt

SEQ ID NO: 1929 - DNA, 21 bp, Artificial Sequence
  source: /note="Description of Artificial Sequence: Synthetic oligonucleotide"
  source: /note="Description of Combined DNA/RNA Molecule: Synthetic oligonucleotide"
cacagaacaugguuccuuctt

SEQ ID NO: 1930 - DNA, 21 bp, Artificial Sequence
  source: /note="Description of Artificial Sequence: Synthetic oligonucleotide"
  source: /note="Description of Combined DNA/RNA Molecule: Synthetic oligonucleotide"
gguuccuucaucccgacuutt

SEQ ID NO: 1931 - DNA, 21 bp, Artificial Sequence
  source: /note="Description of Artificial Sequence: Synthetic oligonucleotide"
  source: /note="Description of Combined DNA/RNA Molecule: Synthetic oligonucleotide"
cccgacuucuggucuauuatt

SEQ ID NO: 1932 - DNA, 21 bp, Artificial Sequence
  source: /note="Description of Artificial Sequence: Synthetic oligonucleotide"
  source: /note="Description of Combined DNA/RNA Molecule: Synthetic oligonucleotide"
ggucuauuacaucgucacatt

SEQ ID NO: 1933 - DNA, 21 bp, Artificial Sequence
  source: /note="Description of Artificial Sequence: Synthetic oligonucleotide"
  source: /note="Description of Combined DNA/RNA Molecule: Synthetic oligonucleotide"
aucgucacaggagaacagatt

SEQ ID NO: 1934 - DNA, 21 bp, Artificial Sequence
  source: /note="Description of Artificial Sequence: Synthetic oligonucleotide"
  source: /note="Description of Combined DNA/RNA Molecule: Synthetic oligonucleotide"
caggagaacagacagcagatt

SEQ ID NO: 1935 - DNA, 21 bp, Artificial Sequence
  source: /note="Description of Artificial Sequence: Synthetic oligonucleotide"
  source: /note="Description of Combined DNA/RNA Molecule: Synthetic oligonucleotide"
cagcagaauuagugucugatt

SEQ ID NO: 1936 - DNA, 21 bp, Artificial Sequence
  source: /note="Description of Artificial Sequence: Synthetic oligonucleotide"
  source: /note="Description of Combined DNA/RNA Molecule: Synthetic oligonucleotide"
gugucugauucagucuggutt

SEQ ID NO: 1937 - DNA, 21 bp, Artificial Sequence
  source: /note="Description of Artificial Sequence: Synthetic oligonucleotide"
  source: /note="Description of Combined DNA/RNA Molecule: Synthetic oligonucleotide"
cagucugguuaaauauugatt

SEQ ID NO: 1938 - DNA, 21 bp, Artificial Sequence
  source: /note="Description of Artificial Sequence: Synthetic oligonucleotide"
  source: /note="Description of Combined DNA/RNA Molecule: Synthetic oligonucleotide"
guuaaauauugaagaaaaatt

SEQ ID NO: 1939 - DNA, 21 bp, Artificial Sequence
  source: /note="Description of Artificial Sequence: Synthetic oligonucleotide"
  source: /note="Description of Combined DNA/RNA Molecule: Synthetic oligonucleotide"
agaaaaauguggcaaccagtt

SEQ ID NO: 1940 - DNA, 21 bp, Artificial Sequence
  source: /note="Description of Artificial Sequence: Synthetic oligonucleotide"
  source: /note="Description of Combined DNA/RNA Molecule: Synthetic oligonucleotide"
gcaaccagcuccagguucatt

SEQ ID NO: 1941 - DNA, 21 bp, Artificial Sequence
  source: /note="Description of Artificial Sequence: Synthetic oligonucleotide"
  source: /note="Description of Combined DNA/RNA Molecule: Synthetic oligonucleotide"
gcuccagguucaucugucutt

SEQ ID NO: 1942 - DNA, 21 bp, Artificial Sequence
  source: /note="Description of Artificial Sequence: Synthetic oligonucleotide"
  source: /note="Description of Combined DNA/RNA Molecule: Synthetic oligonucleotide"
aucugucuccugaugcagatt

SEQ ID NO: 1943 - DNA, 21 bp, Artificial Sequence
  source: /note="Description of Artificial Sequence: Synthetic oligonucleotide"
  source: /note="Description of Combined DNA/RNA Molecule: Synthetic oligonucleotide"
gaugcagaugcauauucuctt

SEQ ID NO: 1944 - DNA, 21 bp, Artificial Sequence
  source: /note="Description of Artificial Sequence: Synthetic oligonucleotide"
  source: /note="Description of Combined DNA/RNA Molecule: Synthetic oligonucleotide"
gcauauucuccaggccaaatt

SEQ ID NO: 1945 - DNA, 21 bp, Artificial Sequence
  source: /note="Description of Artificial Sequence: Synthetic oligonucleotide"
  source: /note="Description of Combined DNA/RNA Molecule: Synthetic oligonucleotide"
aggccaaacugugucucuutt

SEQ ID NO: 1946 - DNA, 21 bp, Artificial Sequence
  source: /note="Description of Artificial Sequence: Synthetic oligonucleotide"
  source: /note="Description of Combined DNA/RNA Molecule: Synthetic oligonucleotide"
gugucucuuaauauggcaatt

SEQ ID NO: 1947 - DNA, 21 bp, Artificial Sequence
  source: /note="Description of Artificial Sequence: Synthetic oligonucleotide"
  source: /note="Description of Combined DNA/RNA Molecule: Synthetic oligonucleotide"
uuaauauggcaacuggaautt

SEQ ID NO: 1948 - DNA, 21 bp, Artificial Sequence
  source: /note="Description of Artificial Sequence: Synthetic oligonucleotide"
  source: /note="Description of Combined DNA/RNA Molecule: Synthetic oligonucleotide"
aacuggaauggauuccuggtt

SEQ ID NO: 1949 - DNA, 21 bp, Artificial Sequence
  source: /note="Description of Artificial Sequence: Synthetic oligonucleotide"
  source: /note="Description of Combined DNA/RNA Molecule: Synthetic oligonucleotide"
uuccuggguggcauuagcatt

SEQ ID NO: 1950 - DNA, 21 bp, Artificial Sequence
  source: /note="Description of Artificial Sequence: Synthetic oligonucleotide"
  source: /note="Description of Combined DNA/RNA Molecule: Synthetic oligonucleotide"
ggcauuagcagcaguggactt

SEQ ID NO: 1951 - DNA, 21 bp, Artificial Sequence
  source: /note="Description of Artificial Sequence: Synthetic oligonucleotide"
  source: /note="Description of Combined DNA/RNA Molecule: Synthetic oligonucleotide"
aguggacagugcuguguautt

SEQ ID NO: 1952 - DNA, 21 bp, Artificial Sequence
  source: /note="Description of Artificial Sequence: Synthetic oligonucleotide"
  source: /note="Description of Combined DNA/RNA Molecule: Synthetic oligonucleotide"
gcuguguauggaguccaaatt

SEQ ID NO: 1953 - DNA, 21 bp, Artificial Sequence
  source: /note="Description of Artificial Sequence: Synthetic oligonucleotide"
  source: /note="Description of Combined DNA/RNA Molecule: Synthetic oligonucleotide"
aguccaaagaggagccaaatt

SEQ ID NO: 1954 - DNA, 21 bp, Artificial Sequence
  source: /note="Description of Artificial Sequence: Synthetic oligonucleotide"
  source: /note="Description of Combined DNA/RNA Molecule: Synthetic oligonucleotide"
agaggagccaaaaagcccutt

SEQ ID NO: 1955 - DNA, 21 bp, Artificial Sequence
  source: /note="Description of Artificial Sequence: Synthetic oligonucleotide"
  source: /note="Description of Combined DNA/RNA Molecule: Synthetic oligonucleotide"
agcccuuggaaagaguauutt

SEQ ID NO: 1956 - DNA, 21 bp, Artificial Sequence
  source: /note="Description of Artificial Sequence: Synthetic oligonucleotide"
  source: /note="Description of Combined DNA/RNA Molecule: Synthetic oligonucleotide"
aagaguauuucaauucuuatt

SEQ ID NO: 1957 - DNA, 21 bp, Artificial Sequence
  source: /note="Description of Artificial Sequence: Synthetic oligonucleotide"
  source: /note="Description of Combined DNA/RNA Molecule: Synthetic oligonucleotide"
uuucaauucuuagagaagatt

SEQ ID NO: 1958 - DNA, 21 bp, Artificial Sequence
  source: /note="Description of Artificial Sequence: Synthetic oligonucleotide"
  source: /note="Description of Combined DNA/RNA Molecule: Synthetic oligonucleotide"
gagaagagugaucugggcutt

SEQ ID NO: 1959 - DNA, 21 bp, Artificial Sequence
  source: /note="Description of Artificial Sequence: Synthetic oligonucleotide"
  source: /note="Description of Combined DNA/RNA Molecule: Synthetic oligonucleotide"
ugaucugggcuguggggcatt

SEQ ID NO: 1960 - DNA, 21 bp, Artificial Sequence
  source: /note="Description of Artificial Sequence: Synthetic oligonucleotide"
  source: /note="Description of Combined DNA/RNA Molecule: Synthetic oligonucleotide"
ggggcaggugguggccucatt

SEQ ID NO: 1961 - DNA, 21 bp, Artificial Sequence
  source: /note="Description of Artificial Sequence: Synthetic oligonucleotide"
  source: /note="Description of Combined DNA/RNA Molecule: Synthetic oligonucleotide"
guggccucaacaaugccaatt

SEQ ID NO: 1962 - DNA, 21 bp, Artificial Sequence
  source: /note="Description of Artificial Sequence: Synthetic oligonucleotide"
  source: /note="Description of Combined DNA/RNA Molecule: Synthetic oligonucleotide"
caacaaugccaauguguuctt

SEQ ID NO: 1963 - DNA, 21 bp, Artificial Sequence
  source: /note="Description of Artificial Sequence: Synthetic oligonucleotide"
  source: /note="Description of Combined DNA/RNA Molecule: Synthetic oligonucleotide"
caauguguuccaccuagcutt

SEQ ID NO: 1964 - DNA, 21 bp, Artificial Sequence
  source: /note="Description of Artificial Sequence: Synthetic oligonucleotide"
  source: /note="Description of Combined DNA/RNA Molecule: Synthetic oligonucleotide"
caccuagcuggacuuaccutt

SEQ ID NO: 1965 - DNA, 21 bp, Artificial Sequence
  source: /note="Description of Artificial Sequence: Synthetic oligonucleotide"
  source: /note="Description of Combined DNA/RNA Molecule: Synthetic oligonucleotide"
gacuuaccuuccucacuaatt

SEQ ID NO: 1966 - DNA, 21 bp, Artificial Sequence
  source: /note="Description of Artificial Sequence: Synthetic oligonucleotide"
  source: /note="Description of Combined DNA/RNA Molecule: Synthetic oligonucleotide"
ucacuaaugcaaaugcagatt

SEQ ID NO: 1967 - DNA, 21 bp, Artificial Sequence
  source: /note="Description of Artificial Sequence: Synthetic oligonucleotide"
  source: /note="Description of Combined DNA/RNA Molecule: Synthetic oligonucleotide"
aaaugcagaugacucccaatt

SEQ ID NO: 1968 - DNA, 21 bp, Artificial Sequence
  source: /note="Description of Artificial Sequence: Synthetic oligonucleotide"
  source: /note="Description of Combined DNA/RNA Molecule: Synthetic oligonucleotide"
cucccaagaaaaugaugaatt

SEQ ID NO: 1969 - DNA, 21 bp, Artificial Sequence
  source: /note="Description of Artificial Sequence: Synthetic oligonucleotide"
  source: /note="Description of Combined DNA/RNA Molecule: Synthetic oligonucleotide"
ccuuguaaagaaauucucatt

SEQ ID NO: 1970 - DNA, 21 bp, Artificial Sequence
  source: /note="Description of Artificial Sequence: Synthetic oligonucleotide"
  source: /note="Description of Combined DNA/RNA Molecule: Synthetic oligonucleotide"
aauucucaggccaagaagatt

SEQ ID NO: 1971 - DNA, 21 bp, Artificial Sequence
  source: /note="Description of Artificial Sequence: Synthetic oligonucleotide"
  source: /note="Description of Combined DNA/RNA Molecule: Synthetic oligonucleotide"
ccaagaagaacgcugcaaatt

SEQ ID NO: 1972 - DNA, 21 bp, Artificial Sequence
  source: /note="Description of Artificial Sequence: Synthetic oligonucleotide"
  source: /note="Description of Combined DNA/RNA Molecule: Synthetic oligonucleotide"
cgcugcaaaagaagauagatt

SEQ ID NO: 1973 - DNA, 21 bp, Artificial Sequence
  source: /note="Description of Artificial Sequence: Synthetic oligonucleotide"
  source: /note="Description of Combined DNA/RNA Molecule: Synthetic oligonucleotide"
aaagaagauagaagaaauatt

SEQ ID NO: 1974 - DNA, 21 bp, Artificial Sequence
  source: /note="Description of Artificial Sequence: Synthetic oligonucleotide"
  source: /note="Description of Combined DNA/RNA Molecule: Synthetic oligonucleotide"
agaaauagcugcuaaauautt

SEQ ID NO: 1975 - DNA, 21 bp, Artificial Sequence
  source: /note="Description of Artificial Sequence: Synthetic oligonucleotide"
  source: /note="Description of Combined DNA/RNA Molecule: Synthetic oligonucleotide"
gcugcuaaauauaaacauutt

SEQ ID NO: 1976 - DNA, 21 bp, Artificial Sequence
  source: /note="Description of Artificial Sequence: Synthetic oligonucleotide"
  source: /note="Description of Combined DNA/RNA Molecule: Synthetic oligonucleotide"
acauucaguagugaagaaatt

SEQ ID NO: 1977 - DNA, 21 bp, Artificial Sequence
  source: /note="Description of Artificial Sequence: Synthetic oligonucleotide"
  source: /note="Description of Combined DNA/RNA Molecule: Synthetic oligonucleotide"
guagugaagaaauguuguutt

SEQ ID NO: 1978 - DNA, 21 bp, Artificial Sequence
  source: /note="Description of Artificial Sequence: Synthetic oligonucleotide"
  source: /note="Description of Combined DNA/RNA Molecule: Synthetic oligonucleotide"
aaauguuguuacgauggagtt

SEQ ID NO: 1979 - DNA, 21 bp, Artificial Sequence
  source: /note="Description of Artificial Sequence: Synthetic oligonucleotide"
  source: /note="Description of Combined DNA/RNA Molecule: Synthetic oligonucleotide"
cgauggagccugcguuaautt

SEQ ID NO: 1980 - DNA, 21 bp, Artificial Sequence
  source: /note="Description of Artificial Sequence: Synthetic oligonucleotide"
  source: /note="Description of Combined DNA/RNA Molecule: Synthetic oligonucleotide"
cguuaauaaugaugaaacctt

SEQ ID NO: 1981 - DNA, 21 bp, Artificial Sequence
  source: /note="Description of Artificial Sequence: Synthetic oligonucleotide"
  source: /note="Description of Combined DNA/RNA Molecule: Synthetic oligonucleotide"
augaugaaaccugugagcatt

SEQ ID NO: 1982 - DNA, 21 bp, Artificial Sequence
  source: /note="Description of Artificial Sequence: Synthetic oligonucleotide"
  source: /note="Description of Combined DNA/RNA Molecule: Synthetic oligonucleotide"
cugugagcagcgagcugcatt

SEQ ID NO: 1983 - DNA, 21 bp, Artificial Sequence
  source: /note="Description of Artificial Sequence: Synthetic oligonucleotide"
  source: /note="Description of Combined DNA/RNA Molecule: Synthetic oligonucleotide"
cgagcugcacggauuaguutt

SEQ ID NO: 1984 - DNA, 21 bp, Artificial Sequence
  source: /note="Description of Artificial Sequence: Synthetic oligonucleotide"
  source: /note="Description of Combined DNA/RNA Molecule: Synthetic oligonucleotide"
ggauuaguuuagggccaagtt

SEQ ID NO: 1985 - DNA, 21 bp, Artificial Sequence
  source: /note="Description of Artificial Sequence: Synthetic oligonucleotide"
  source: /note="Description of Combined DNA/RNA Molecule: Synthetic oligonucleotide"
gggccaagaugcaucaaagtt

SEQ ID NO: 1986 - DNA, 21 bp, Artificial Sequence
  source: /note="Description of Artificial Sequence: Synthetic oligonucleotide"
  source: /note="Description of Combined DNA/RNA Molecule: Synthetic oligonucleotide"
caucaaagcuuucacugaatt

SEQ ID NO: 1987 - DNA, 21 bp, Artificial Sequence
  source: /note="Description of Artificial Sequence: Synthetic oligonucleotide"
  source: /note="Description of Combined DNA/RNA Molecule: Synthetic oligonucleotide"
gcuuucacugaauguugugtt

SEQ ID NO: 1988 - DNA, 21 bp, Artificial Sequence
  source: /note="Description of Artificial Sequence: Synthetic oligonucleotide"
  source: /note="Description of Combined DNA/RNA Molecule: Synthetic oligonucleotide"
aauguugugucgucgcaagtt

SEQ ID NO: 1989 - DNA, 21 bp, Artificial Sequence
  source: /note="Description of Artificial Sequence: Synthetic oligonucleotide"
  source: /note="Description of Combined DNA/RNA Molecule: Synthetic oligonucleotide"
cgucgcaagccagcuccgutt

SEQ ID NO: 1990 - DNA, 21 bp, Artificial Sequence
  source: /note="Description of Artificial Sequence: Synthetic oligonucleotide"
  source: /note="Description of Combined DNA/RNA Molecule: Synthetic oligonucleotide"
gcuccgugcuaauaucucutt

SEQ ID NO: 1991 - DNA, 21 bp, Artificial Sequence
  source: /note="Description of Artificial Sequence: Synthetic oligonucleotide"
  source: /note="Description of Combined DNA/RNA Molecule: Synthetic oligonucleotide"
cuaauaucucucauaaagatt

SEQ ID NO: 1992 - DNA, 21 bp, Artificial Sequence
  source: /note="Description of Artificial Sequence: Synthetic oligonucleotide"
  source: /note="Description of Combined DNA/RNA Molecule: Synthetic oligonucleotide"
aaagacaugcaauugggaatt

SEQ ID NO: 1993 - DNA, 21 bp, Artificial Sequence
  source: /note="Description of Artificial Sequence: Synthetic oligonucleotide"
  source: /note="Description of Combined DNA/RNA Molecule: Synthetic oligonucleotide"
caauugggaaggcuacacatt

SEQ ID NO: 1994 - DNA, 21 bp, Artificial Sequence
  source: /note="Description of Artificial Sequence: Synthetic oligonucleotide"
  source: /note="Description of Combined DNA/RNA Molecule: Synthetic oligonucleotide"
gcuacacaugaagacccugtt

SEQ ID NO: 1995 - DNA, 21 bp, Artificial Sequence
  source: /note="Description of Artificial Sequence: Synthetic oligonucleotide"
  source: /note="Description of Combined DNA/RNA Molecule: Synthetic oligonucleotide"
caugaagacccuguuaccatt

SEQ ID NO: 1996 - DNA, 21 bp, Artificial Sequence
  source: /note="Description of Artificial Sequence: Synthetic oligonucleotide"
  source: /note="Description of Combined DNA/RNA Molecule: Synthetic oligonucleotide"
uaccaguaagcaagccagatt

SEQ ID NO: 1997 - DNA, 21 bp, Artificial Sequence
  source: /note="Description of Artificial Sequence: Synthetic oligonucleotide"
  source: /note="Description of Combined DNA/RNA Molecule: Synthetic oligonucleotide"
agcaagccagaaauucggatt

SEQ ID NO: 1998 - DNA, 21 bp, Artificial Sequence
  source: /note="Description of Artificial Sequence: Synthetic oligonucleotide"
  source: /note="Description of Combined DNA/RNA Molecule: Synthetic oligonucleotide"
agaaauucggaguuauuuutt

SEQ ID NO: 1999 - DNA, 21 bp, Artificial Sequence
  source: /note="Description of Artificial Sequence: Synthetic oligonucleotide"
  source: /note="Description of Combined DNA/RNA Molecule: Synthetic oligonucleotide"
aguuauuuuccagaaagcutt

SEQ ID NO: 2000 - DNA, 21 bp, Artificial Sequence
  source: /note="Description of Artificial Sequence: Synthetic oligonucleotide"
  source: /note="Description of Combined DNA/RNA Molecule: Synthetic oligonucleotide"
cagaaagcugguugugggatt

SEQ ID NO: 2001 - DNA, 21 bp, Artificial Sequence
  source: /note="Description of Artificial Sequence: Synthetic oligonucleotide"
  source: /note="Description of Combined DNA/RNA Molecule: Synthetic oligonucleotide"
gugggaaguucaucuuguutt

SEQ ID NO: 2002 - DNA, 21 bp, Artificial Sequence
  source: /note="Description of Artificial Sequence: Synthetic oligonucleotide"
  source: /note="Description of Combined DNA/RNA Molecule: Synthetic oligonucleotide"
ucaucuuguucccagaagatt

SEQ ID NO: 2003 - DNA, 21 bp, Artificial Sequence
  source: /note="Description of Artificial Sequence: Synthetic oligonucleotide"
  source: /note="Description of Combined DNA/RNA Molecule: Synthetic oligonucleotide"
ccagaagaaaacaguugcatt

SEQ ID NO: 2004 - DNA, 21 bp, Artificial Sequence
  source: /note="Description of Artificial Sequence: Synthetic oligonucleotide"
  source: /note="Description of Combined DNA/RNA Molecule: Synthetic oligonucleotide"
caguugcaguuugcccuactt

SEQ ID NO: 2005 - DNA, 21 bp, Artificial Sequence
  source: /note="Description of Artificial Sequence: Synthetic oligonucleotide"
  source: /note="Description of Combined DNA/RNA Molecule: Synthetic oligonucleotide"
caguuugcccuaccugauutt

SEQ ID NO: 2006 - DNA, 21 bp, Artificial Sequence
  source: /note="Description of Artificial Sequence: Synthetic oligonucleotide"
  source: /note="Description of Combined DNA/RNA Molecule: Synthetic oligonucleotide"
ccugauucucuaaccaccutt

SEQ ID NO: 2007 - DNA, 21 bp, Artificial Sequence
  source: /note="Description of Artificial Sequence: Synthetic oligonucleotide"
  source: /note="Description of Combined DNA/RNA Molecule: Synthetic oligonucleotide"
accaccugggaaauucaagtt

SEQ ID NO: 2008 - DNA, 21 bp, Artificial Sequence
  source: /note="Description of Artificial Sequence: Synthetic oligonucleotide"
  source: /note="Description of Combined DNA/RNA Molecule: Synthetic oligonucleotide"
gaaauucaaggcguuggcatt

SEQ ID NO: 2009 - DNA, 21 bp, Artificial Sequence
  source: /note="Description of Artificial Sequence: Synthetic oligonucleotide"
  source: /note="Description of Combined DNA/RNA Molecule: Synthetic oligonucleotide"
cguuggcauuucaaacacutt

SEQ ID NO: 2010 - DNA, 21 bp, Artificial Sequence
  source: /note="Description of Artificial Sequence: Synthetic oligonucleotide"
  source: /note="Description of Combined DNA/RNA Molecule: Synthetic oligonucleotide"
cauuucaaacacugguauatt

SEQ ID NO: 2011 - DNA, 21 bp, Artificial Sequence
  source: /note="Description of Artificial Sequence: Synthetic oligonucleotide"
  source: /note="Description of Combined DNA/RNA Molecule: Synthetic oligonucleotide"
guauauguguugcugauactt

SEQ ID NO: 2012 - DNA, 21 bp, Artificial Sequence
  source: /note="Description of Artificial Sequence: Synthetic oligonucleotide"
  source: /note="Description of Combined DNA/RNA Molecule: Synthetic oligonucleotide"
ugcugauacugucaaggcatt

SEQ ID NO: 2013 - DNA, 21 bp, Artificial Sequence
  source: /note="Description of Artificial Sequence: Synthetic oligonucleotide"
  source: /note="Description of Combined DNA/RNA Molecule: Synthetic oligonucleotide"
cugucaaggcaaagguguutt

SEQ ID NO: 2014 - DNA, 21 bp, Artificial Sequence
  source: /note="Description of Artificial Sequence: Synthetic oligonucleotide"
  source: /note="Description of Combined DNA/RNA Molecule: Synthetic oligonucleotide"
agguguucaaagaugucuutt

SEQ ID NO: 2015 - DNA, 21 bp, Artificial Sequence
  source: /note="Description of Artificial Sequence: Synthetic oligonucleotide"
  source: /note="Description of Combined DNA/RNA Molecule: Synthetic oligonucleotide"
caaagaugucuuccuggaatt

SEQ ID NO: 2016 - DNA, 21 bp, Artificial Sequence
  source: /note="Description of Artificial Sequence: Synthetic oligonucleotide"
  source: /note="Description of Combined DNA/RNA Molecule: Synthetic oligonucleotide"
cuuccuggaaaugaauauatt

SEQ ID NO: 2017 - DNA, 21 bp, Artificial Sequence
  source: /note="Description of Artificial Sequence: Synthetic oligonucleotide"
  source: /note="Description of Combined DNA/RNA Molecule: Synthetic oligonucleotide"
gaauauaccauauucuguutt

SEQ ID NO: 2018 - DNA, 21 bp, Artificial Sequence
  source: /note="Description of Artificial Sequence: Synthetic oligonucleotide"
  source: /note="Description of Combined DNA/RNA Molecule: Synthetic oligonucleotide"
auauucuguuguacgaggatt

SEQ ID NO: 2019 - DNA, 21 bp, Artificial Sequence
  source: /note="Description of Artificial Sequence: Synthetic oligonucleotide"
  source: /note="Description of Combined DNA/RNA Molecule: Synthetic oligonucleotide"
cgaggagaacagauccaautt

SEQ ID NO: 2020 - DNA, 21 bp, Artificial Sequence
  source: /note="Description of Artificial Sequence: Synthetic oligonucleotide"
  source: /note="Description of Combined DNA/RNA Molecule: Synthetic oligonucleotide"
gaacagauccaauugaaagtt

SEQ ID NO: 2021 - DNA, 21 bp, Artificial Sequence
  source: /note="Description of Artificial Sequence: Synthetic oligonucleotide"
  source: /note="Description of Combined DNA/RNA Molecule: Synthetic oligonucleotide"
gaaaggaacuguuuacaactt

SEQ ID NO: 2022 - DNA, 21 bp, Artificial Sequence
  source: /note="Description of Artificial Sequence: Synthetic oligonucleotide"
  source: /note="Description of Combined DNA/RNA Molecule: Synthetic oligonucleotide"
acuguuuacaacuauaggatt

SEQ ID NO: 2023 - DNA, 21 bp, Artificial Sequence
  source: /note="Description of Artificial Sequence: Synthetic oligonucleotide"
  source: /note="Description of Combined DNA/RNA Molecule: Synthetic oligonucleotide"
aacuauaggacuucugggatt

SEQ ID NO: 2024 - DNA, 21 bp, Artificial Sequence
  source: /note="Description of Artificial Sequence: Synthetic oligonucleotide"
  source: /note="Description of Combined DNA/RNA Molecule: Synthetic oligonucleotide"
ugggaugcaguucuguguutt

SEQ ID NO: 2025 - DNA, 21 bp, Artificial Sequence
  source: /note="Description of Artificial Sequence: Synthetic oligonucleotide"
  source: /note="Description of Combined DNA/RNA Molecule: Synthetic oligonucleotide"
guucuguguuaaaaugucutt

SEQ ID NO: 2026 - DNA, 21 bp, Artificial Sequence
  source: /note="Description of Artificial Sequence: Synthetic oligonucleotide"
  source: /note="Description of Combined DNA/RNA Molecule: Synthetic oligonucleotide"
uuaaaaugucugcuguggatt

SEQ ID NO: 2027 - DNA, 21 bp, Artificial Sequence
  source: /note="Description of Artificial Sequence: Synthetic oligonucleotide"
  source: /note="Description of Combined DNA/RNA Molecule: Synthetic oligonucleotide"
cuguggagggaaucugcactt

SEQ ID NO: 2028 - DNA, 21 bp, Artificial Sequence
  source: /note="Description of Artificial Sequence: Synthetic oligonucleotide"
  source: /note="Description of Combined DNA/RNA Molecule: Synthetic oligonucleotide"
ggaaucugcacuucggaaatt

SEQ ID NO: 2029 - DNA, 21 bp, Artificial Sequence
  source: /note="Description of Artificial Sequence: Synthetic oligonucleotide"
  source: /note="Description of Combined DNA/RNA Molecule: Synthetic oligonucleotide"
cggaaagcccagucauugatt

SEQ ID NO: 2030 - DNA, 21 bp, Artificial Sequence
  source: /note="Description of Artificial Sequence: Synthetic oligonucleotide"
  source: /note="Description of Combined DNA/RNA Molecule: Synthetic oligonucleotide"
ccagucauugaucaucaggtt

SEQ ID NO: 2031 - DNA, 21 bp, Artificial Sequence
  source: /note="Description of Artificial Sequence: Synthetic oligonucleotide"
  source: /note="Description of Combined DNA/RNA Molecule: Synthetic oligonucleotide"
caucagggcacaaaguccutt

SEQ ID NO: 2032 - DNA, 21 bp, Artificial Sequence
  source: /note="Description of Artificial Sequence: Synthetic oligonucleotide"
  source: /note="Description of Combined DNA/RNA Molecule: Synthetic oligonucleotide"
ggcacaaaguccuccaaautt

SEQ ID NO: 2033 - DNA, 21 bp, Artificial Sequence
  source: /note="Description of Artificial Sequence: Synthetic oligonucleotide"
  source: /note="Description of Combined DNA/RNA Molecule: Synthetic oligonucleotide"
caaaugugugcgccagaaatt

SEQ ID NO: 2034 - DNA, 21 bp, Artificial Sequence
  source: /note="Description of Artificial Sequence: Synthetic oligonucleotide"
  source: /note="Description of Combined DNA/RNA Molecule: Synthetic oligonucleotide"
gcgccagaaaguagagggctt

SEQ ID NO: 2035 - DNA, 21 bp, Artificial Sequence
  source: /note="Description of Artificial Sequence: Synthetic oligonucleotide"
  source: /note="Description of Combined DNA/RNA Molecule: Synthetic oligonucleotide"
aguagagggcuccuccagutt

SEQ ID NO: 2036 - DNA, 21 bp, Artificial Sequence
  source: /note="Description of Artificial Sequence: Synthetic oligonucleotide"
  source: /note="Description of Combined DNA/RNA Molecule: Synthetic oligonucleotide"
ccuccagucacuuggugactt

SEQ ID NO: 2037 - DNA, 21 bp, Artificial Sequence
  source: /note="Description of Artificial Sequence: Synthetic oligonucleotide"
  source: /note="Description of Combined DNA/RNA Molecule: Synthetic oligonucleotide"
ucacuuggugacauucacutt

SEQ ID NO: 2038 - DNA, 21 bp, Artificial Sequence
  source: /note="Description of Artificial Sequence: Synthetic oligonucleotide"
  source: /note="Description of Combined DNA/RNA Molecule: Synthetic oligonucleotide"
cauucacugugcuuccucutt

SEQ ID NO: 2039 - DNA, 21 bp, Artificial Sequence
  source: /note="Description of Artificial Sequence: Synthetic oligonucleotide"
  source: /note="Description of Combined DNA/RNA Molecule: Synthetic oligonucleotide"
ggaaauuggccuucacaactt

SEQ ID NO: 2040 - DNA, 21 bp, Artificial Sequence
  source: /note="Description of Artificial Sequence: Synthetic oligonucleotide"
  source: /note="Description of Combined DNA/RNA Molecule: Synthetic oligonucleotide"
cuucacaacaucaauuuuutt

SEQ ID NO: 2041 - DNA, 21 bp, Artificial Sequence
  source: /note="Description of Artificial Sequence: Synthetic oligonucleotide"
  source: /note="Description of Combined DNA/RNA Molecule: Synthetic oligonucleotide"
aauuuuucacuggagacuutt

SEQ ID NO: 2042 - DNA, 21 bp, Artificial Sequence
  source: /note="Description of Artificial Sequence: Synthetic oligonucleotide"
  source: /note="Description of Combined DNA/RNA Molecule: Synthetic oligonucleotide"
cuggagacuugguuuggaatt

SEQ ID NO: 2043 - DNA, 21 bp, Artificial Sequence
  source: /note="Description of Artificial Sequence: Synthetic oligonucleotide"
  source: /note="Description of Combined DNA/RNA Molecule: Synthetic oligonucleotide"
gguuuggaaaagaaaucuutt

SEQ ID NO: 2044 - DNA, 21 bp, Artificial Sequence
  source: /note="Description of Artificial Sequence: Synthetic oligonucleotide"
  source: /note="Description of Combined DNA/RNA Molecule: Synthetic oligonucleotide"
aaucuuaguaaaaacauuatt

SEQ ID NO: 2045 - DNA, 21 bp, Artificial Sequence
  source: /note="Description of Artificial Sequence: Synthetic oligonucleotide"
  source: /note="Description of Combined DNA/RNA Molecule: Synthetic oligonucleotide"
aaaaacauuacgaguggugtt

SEQ ID NO: 2046 - DNA, 21 bp, Artificial Sequence
  source: /note="Description of Artificial Sequence: Synthetic oligonucleotide"
  source: /note="Description of Combined DNA/RNA Molecule: Synthetic oligonucleotide"
gaguggugccagaaggugutt

SEQ ID NO: 2047 - DNA, 21 bp, Artificial Sequence
  source: /note="Description of Artificial Sequence: Synthetic oligonucleotide"
  source: /note="Description of Combined DNA/RNA Molecule: Synthetic oligonucleotide"
agaaggugucaaaagggaatt

SEQ ID NO: 2048 - DNA, 21 bp, Artificial Sequence
  source: /note="Description of Artificial Sequence: Synthetic oligonucleotide"
  source: /note="Description of Combined DNA/RNA Molecule: Synthetic oligonucleotide"
ugucaaaagggaaagcuautt

SEQ ID NO: 2049 - DNA, 21 bp, Artificial Sequence
  source: /note="Description of Artificial Sequence: Synthetic oligonucleotide"
  source: /note="Description of Combined DNA/RNA Molecule: Synthetic oligonucleotide"
gcuauucugguguuacuuutt

SEQ ID NO: 2050 - DNA, 21 bp, Artificial Sequence
  source: /note="Description of Artificial Sequence: Synthetic oligonucleotide"
  source: /note="Description of Combined DNA/RNA Molecule: Synthetic oligonucleotide"
guguuacuuuggauccuagtt

SEQ ID NO: 2051 - DNA, 21 bp, Artificial Sequence
  source: /note="Description of Artificial Sequence: Synthetic oligonucleotide"
  source: /note="Description of Combined DNA/RNA Molecule: Synthetic oligonucleotide"
ggauccuagggguauuuautt

SEQ ID NO: 2052 - DNA, 21 bp, Artificial Sequence
  source: /note="Description of Artificial Sequence: Synthetic oligonucleotide"
  source: /note="Description of Combined DNA/RNA Molecule: Synthetic oligonucleotide"
gguauuuaugguaccauuatt

SEQ ID NO: 2053 - DNA, 21 bp, Artificial Sequence
  source: /note="Description of Artificial Sequence: Synthetic oligonucleotide"
  source: /note="Description of Combined DNA/RNA Molecule: Synthetic oligonucleotide"
guaccauuagcagacgaaatt

SEQ ID NO: 2054 - DNA, 21 bp, Artificial Sequence
  source: /note="Description of Artificial Sequence: Synthetic oligonucleotide"
  source: /note="Description of Combined DNA/RNA Molecule: Synthetic oligonucleotide"
cagacgaaaggaguucccatt

SEQ ID NO: 2055 - DNA, 21 bp, Artificial Sequence
  source: /note="Description of Artificial Sequence: Synthetic oligonucleotide"
  source: /note="Description of Combined DNA/RNA Molecule: Synthetic oligonucleotide"
aggaguucccauacaggautt

SEQ ID NO: 2056 - DNA, 21 bp, Artificial Sequence
  source: /note="Description of Artificial Sequence: Synthetic oligonucleotide"
  source: /note="Description of Combined DNA/RNA Molecule: Synthetic oligonucleotide"
cauacaggauacccuuagatt

SEQ ID NO: 2057 - DNA, 21 bp, Artificial Sequence
  source: /note="Description of Artificial Sequence: Synthetic oligonucleotide"
  source: /note="Description of Combined DNA/RNA Molecule: Synthetic oligonucleotide"
cuuagauuugguccccaaatt

SEQ ID NO: 2058 - DNA, 21 bp, Artificial Sequence
  source: /note="Description of Artificial Sequence: Synthetic oligonucleotide"
  source: /note="Description of Combined DNA/RNA Molecule: Synthetic oligonucleotide"
uccccaaaacagaaaucaatt

SEQ ID NO: 2059 - DNA, 21 bp, Artificial Sequence
  source: /note="Description of Artificial Sequence: Synthetic oligonucleotide"
  source: /note="Description of Combined DNA/RNA Molecule: Synthetic oligonucleotide"
acagaaaucaaaaggauuutt

SEQ ID NO: 2060 - DNA, 21 bp, Artificial Sequence
  source: /note="Description of Artificial Sequence: Synthetic oligonucleotide"
  source: /note="Description of Combined DNA/RNA Molecule: Synthetic oligonucleotide"
aaaggauuuugaguguaaatt

SEQ ID NO: 2061 - DNA, 21 bp, Artificial Sequence
  source: /note="Description of Artificial Sequence: Synthetic oligonucleotide"
  source: /note="Description of Combined DNA/RNA Molecule: Synthetic oligonucleotide"
aguguaaaaggacugcuugtt

SEQ ID NO: 2062 - DNA, 21 bp, Artificial Sequence
  source: /note="Description of Artificial Sequence: Synthetic oligonucleotide"
  source: /note="Description of Combined DNA/RNA Molecule: Synthetic oligonucleotide"
aaggacugcuuguaggugatt

SEQ ID NO: 2063 - DNA, 21 bp, Artificial Sequence
  source: /note="Description of Artificial Sequence: Synthetic oligonucleotide"
  source: /note="Description of Combined DNA/RNA Molecule: Synthetic oligonucleotide"
guaggugagaucuugucugtt

SEQ ID NO: 2064 - DNA, 21 bp, Artificial Sequence
  source: /note="Description of Artificial Sequence: Synthetic oligonucleotide"
  source: /note="Description of Combined DNA/RNA Molecule: Synthetic oligonucleotide"
aucuugucugcaguucuaatt

SEQ ID NO: 2065 - DNA, 21 bp, Artificial Sequence
  source: /note="Description of Artificial Sequence: Synthetic oligonucleotide"
  source: /note="Description of Combined DNA/RNA Molecule: Synthetic oligonucleotide"
guucuaagucaggaaggcatt

SEQ ID NO: 2066 - DNA, 21 bp, Artificial Sequence
  source: /note="Description of Artificial Sequence: Synthetic oligonucleotide"
  source: /note="Description of Combined DNA/RNA Molecule: Synthetic oligonucleotide"
gaaggcaucaauauccuaatt

SEQ ID NO: 2067 - DNA, 21 bp, Artificial Sequence
  source: /note="Description of Artificial Sequence: Synthetic oligonucleotide"
  source: /note="Description of Combined DNA/RNA Molecule: Synthetic oligonucleotide"
ucaauauccuaacccaccutt

SEQ ID NO: 2068 - DNA, 21 bp, Artificial Sequence
  source: /note="Description of Artificial Sequence: Synthetic oligonucleotide"
  source: /note="Description of Combined DNA/RNA Molecule: Synthetic oligonucleotide"
ccaccuccccaaagggagutt

SEQ ID NO: 2069 - DNA, 21 bp, Artificial Sequence
  source: /note="Description of Artificial Sequence: Synthetic oligonucleotide"
  source: /note="Description of Combined DNA/RNA Molecule: Synthetic oligonucleotide"
ccccaaagggagugcagagtt

SEQ ID NO: 2070 - DNA, 21 bp, Artificial Sequence
  source: /note="Description of Artificial Sequence: Synthetic oligonucleotide"
  source: /note="Description of Combined DNA/RNA Molecule: Synthetic oligonucleotide"
gugcagaggcggagcugautt

SEQ ID NO: 2071 - DNA, 21 bp, Artificial Sequence
  source: /note="Description of Artificial Sequence: Synthetic oligonucleotide"
  source: /note="Description of Combined DNA/RNA Molecule: Synthetic oligonucleotide"
ggagcugaugagcguuguctt

SEQ ID NO: 2072 - DNA, 21 bp, Artificial Sequence
  source: /note="Description of Artificial Sequence: Synthetic oligonucleotide"
  source: /note="Description of Combined DNA/RNA Molecule: Synthetic oligonucleotide"
cguugucccaguauucuautt

SEQ ID NO: 2073 - DNA, 21 bp, Artificial Sequence
  source: /note="Description of Artificial Sequence: Synthetic oligonucleotide"
  source: /note="Description of Combined DNA/RNA Molecule: Synthetic oligonucleotide"
ccaguauucuauguuuuuctt

SEQ ID NO: 2074 - DNA, 21 bp, Artificial Sequence
  source: /note="Description of Artificial Sequence: Synthetic oligonucleotide"
  source: /note="Description of Combined DNA/RNA Molecule: Synthetic oligonucleotide"
guuuuucacuaccuggaaatt

SEQ ID NO: 2075 - DNA, 21 bp, Artificial Sequence
  source: /note="Description of Artificial Sequence: Synthetic oligonucleotide"
  source: /note="Description of Combined DNA/RNA Molecule: Synthetic oligonucleotide"
ccuggaaacaggaaaucautt

SEQ ID NO: 2076 - DNA, 21 bp, Artificial Sequence
  source: /note="Description of Artificial Sequence: Synthetic oligonucleotide"
  source: /note="Description of Combined DNA/RNA Molecule: Synthetic oligonucleotide"
ggaacauuuuucauucugatt

SEQ ID NO: 2077 - DNA, 21 bp, Artificial Sequence
  source: /note="Description of Artificial Sequence: Synthetic oligonucleotide"
  source: /note="Description of Combined DNA/RNA Molecule: Synthetic oligonucleotide"
cauucugacccauuaauugtt

SEQ ID NO: 2078 - DNA, 21 bp, Artificial Sequence
  source: /note="Description of Artificial Sequence: Synthetic oligonucleotide"
  source: /note="Description of Combined DNA/RNA Molecule: Synthetic oligonucleotide"
ccauuaauugaaaagcagatt

SEQ ID NO: 2079 - DNA, 21 bp, Artificial Sequence
  source: /note="Description of Artificial Sequence: Synthetic oligonucleotide"
  source: /note="Description of Combined DNA/RNA Molecule: Synthetic oligonucleotide"
aaagcagaaacugaagaaatt

SEQ ID NO: 2080 - DNA, 21 bp, Artificial Sequence
  source: /note="Description of Artificial Sequence: Synthetic oligonucleotide"
  source: /note="Description of Combined DNA/RNA Molecule: Synthetic oligonucleotide"
aacugaagaaaaaauuaaatt

SEQ ID NO: 2081 - DNA, 21 bp, Artificial Sequence
  source: /note="Description of Artificial Sequence: Synthetic oligonucleotide"
  source: /note="Description of Combined DNA/RNA Molecule: Synthetic oligonucleotide"
aaaaaauuaaaagaagggatt

SEQ ID NO: 2082 - DNA, 21 bp, Artificial Sequence
  source: /note="Description of Artificial Sequence: Synthetic oligonucleotide"
  source: /note="Description of Combined DNA/RNA Molecule: Synthetic oligonucleotide"
agggauguugagcauuaugtt

SEQ ID NO: 2083 - DNA, 21 bp, Artificial Sequence
  source: /note="Description of Artificial Sequence: Synthetic oligonucleotide"
  source: /note="Description of Combined DNA/RNA Molecule: Synthetic oligonucleotide"
gagcauuauguccuacagatt

SEQ ID NO: 2084 - DNA, 21 bp, Artificial Sequence
  source: /note="Description of Artificial Sequence: Synthetic oligonucleotide"
  source: /note="Description of Combined DNA/RNA Molecule: Synthetic oligonucleotide"
uguccuacagaaaugcugatt

SEQ ID NO: 2085 - DNA, 21 bp, Artificial Sequence
  source: /note="Description of Artificial Sequence: Synthetic oligonucleotide"
  source: /note="Description of Combined DNA/RNA Molecule: Synthetic oligonucleotide"
aaugcugacuacucuuacatt

SEQ ID NO: 2086 - DNA, 21 bp, Artificial Sequence
  source: /note="Description of Artificial Sequence: Synthetic oligonucleotide"
  source: /note="Description of Combined DNA/RNA Molecule: Synthetic oligonucleotide"
uacucuuacaguguguggatt

SEQ ID NO: 2087 - DNA, 21 bp, Artificial Sequence
  source: /note="Description of Artificial Sequence: Synthetic oligonucleotide"
  source: /note="Description of Combined DNA/RNA Molecule: Synthetic oligonucleotide"
aguguguggaaggguggaatt

SEQ ID NO: 2088 - DNA, 21 bp, Artificial Sequence
  source: /note="Description of Artificial Sequence: Synthetic oligonucleotide"
  source: /note="Description of Combined DNA/RNA Molecule: Synthetic oligonucleotide"
ggguggaagugcuagcacutt

SEQ ID NO: 2089 - DNA, 21 bp, Artificial Sequence
  source: /note="Description of Artificial Sequence: Synthetic oligonucleotide"
  source: /note="Description of Combined DNA/RNA Molecule: Synthetic oligonucleotide"
gcuagcacuugguuaacagtt

SEQ ID NO: 2090 - DNA, 21 bp, Artificial Sequence
  source: /note="Description of Artificial Sequence: Synthetic oligonucleotide"
  source: /note="Description of Combined DNA/RNA Molecule: Synthetic oligonucleotide"
gguuaacagcuuuugcuuutt

SEQ ID NO: 2091 - DNA, 21 bp, Artificial Sequence
  source: /note="Description of Artificial Sequence: Synthetic oligonucleotide"
  source: /note="Description of Combined DNA/RNA Molecule: Synthetic oligonucleotide"
ugcuuuaagaguacuuggatt

SEQ ID NO: 2092 - DNA, 21 bp, Artificial Sequence
  source: /note="Description of Artificial Sequence: Synthetic oligonucleotide"
  source: /note="Description of Combined DNA/RNA Molecule: Synthetic oligonucleotide"
guacuuggacaaguaaauatt

SEQ ID NO: 2093 - DNA, 21 bp, Artificial Sequence
  source: /note="Description of Artificial Sequence: Synthetic oligonucleotide"
  source: /note="Description of Combined DNA/RNA Molecule: Synthetic oligonucleotide"
caaguaaauaaauacguagtt

SEQ ID NO: 2094 - DNA, 21 bp, Artificial Sequence
  source: /note="Description of Artificial Sequence: Synthetic oligonucleotide"
  source: /note="Description of Combined DNA/RNA Molecule: Synthetic oligonucleotide"
auaaauacguagagcagaatt

SEQ ID NO: 2095 - DNA, 21 bp, Artificial Sequence
  source: /note="Description of Artificial Sequence: Synthetic oligonucleotide"
  source: /note="Description of Combined DNA/RNA Molecule: Synthetic oligonucleotide"
gagcagaaccaaaauucaatt

SEQ ID NO: 2096 - DNA, 21 bp, Artificial Sequence
  source: /note="Description of Artificial Sequence: Synthetic oligonucleotide"
  source: /note="Description of Combined DNA/RNA Molecule: Synthetic oligonucleotide"
aauucaauuuguaauucuutt

SEQ ID NO: 2097 - DNA, 21 bp, Artificial Sequence
  source: /note="Description of Artificial Sequence: Synthetic oligonucleotide"
  source: /note="Description of Combined DNA/RNA Molecule: Synthetic oligonucleotide"
guaauucuuuauuguggcutt

SEQ ID NO: 2098 - DNA, 21 bp, Artificial Sequence
  source: /note="Description of Artificial Sequence: Synthetic oligonucleotide"
  source: /note="Description of Combined DNA/RNA Molecule: Synthetic oligonucleotide"
auuguggcuaguugagaautt

SEQ ID NO: 2099 - DNA, 21 bp, Artificial Sequence
  source: /note="Description of Artificial Sequence: Synthetic oligonucleotide"
  source: /note="Description of Combined DNA/RNA Molecule: Synthetic oligonucleotide"
cuaguugagaauuaucaautt

SEQ ID NO: 2100 - DNA, 21 bp, Artificial Sequence
  source: /note="Description of Artificial Sequence: Synthetic oligonucleotide"
  source: /note="Description of Combined DNA/RNA Molecule: Synthetic oligonucleotide"
uuaucaauuagauaauggatt

SEQ ID NO: 2101 - DNA, 21 bp, Artificial Sequence
  source: /note="Description of Artificial Sequence: Synthetic oligonucleotide"
  source: /note="Description of Combined DNA/RNA Molecule: Synthetic oligonucleotide"
aauggaucuuucaaggaaatt

SEQ ID NO: 2102 - DNA, 21 bp, Artificial Sequence
  source: /note="Description of Artificial Sequence: Synthetic oligonucleotide"
  source: /note="Description of Combined DNA/RNA Molecule: Synthetic oligonucleotide"
cuuucaaggaaaauucacatt

SEQ ID NO: 2103 - DNA, 21 bp, Artificial Sequence
  source: /note="Description of Artificial Sequence: Synthetic oligonucleotide"
  source: /note="Description of Combined DNA/RNA Molecule: Synthetic oligonucleotide"
aauucacaguaucaaccaatt

SEQ ID NO: 2104 - DNA, 21 bp, Artificial Sequence
  source: /note="Description of Artificial Sequence: Synthetic oligonucleotide"
  source: /note="Description of Combined DNA/RNA Molecule: Synthetic oligonucleotide"
guaucaaccaauaaaauuatt

SEQ ID NO: 2105 - DNA, 21 bp, Artificial Sequence
  source: /note="Description of Artificial Sequence: Synthetic oligonucleotide"
  source: /note="Description of Combined DNA/RNA Molecule: Synthetic oligonucleotide"
aaaauuacaggguaccuugtt

SEQ ID NO: 2106 - DNA, 21 bp, Artificial Sequence
  source: /note="Description of Artificial Sequence: Synthetic oligonucleotide"
  source: /note="Description of Combined DNA/RNA Molecule: Synthetic oligonucleotide"
aggguaccuugccuguugatt

SEQ ID NO: 2107 - DNA, 21 bp, Artificial Sequence
  source: /note="Description of Artificial Sequence: Synthetic oligonucleotide"
  source: /note="Description of Combined DNA/RNA Molecule: Synthetic oligonucleotide"
guugaagcccgagagaacatt

SEQ ID NO: 2108 - DNA, 21 bp, Artificial Sequence
  source: /note="Description of Artificial Sequence: Synthetic oligonucleotide"
  source: /note="Description of Combined DNA/RNA Molecule: Synthetic oligonucleotide"
ccgagagaacagcuuauautt

SEQ ID NO: 2109 - DNA, 21 bp, Artificial Sequence
  source: /note="Description of Artificial Sequence: Synthetic oligonucleotide"
  source: /note="Description of Combined DNA/RNA Molecule: Synthetic oligonucleotide"
gcuuauaucuuacagccuutt

SEQ ID NO: 2110 - DNA, 21 bp, Artificial Sequence
  source: /note="Description of Artificial Sequence: Synthetic oligonucleotide"
  source: /note="Description of Combined DNA/RNA Molecule: Synthetic oligonucleotide"
cuuacagccuuuacugugatt

SEQ ID NO: 2111 - DNA, 21 bp, Artificial Sequence
  source: /note="Description of Artificial Sequence: Synthetic oligonucleotide"
  source: /note="Description of Combined DNA/RNA Molecule: Synthetic oligonucleotide"
gaauuagaaaggcuuucgatt

SEQ ID NO: 2112 - DNA, 21 bp, Artificial Sequence
  source: /note="Description of Artificial Sequence: Synthetic oligonucleotide"
  source: /note="Description of Combined DNA/RNA Molecule: Synthetic oligonucleotide"
ggcuuucgauauaugcccctt

SEQ ID NO: 2113 - DNA, 21 bp, Artificial Sequence
  source: /note="Description of Artificial Sequence: Synthetic oligonucleotide"
  source: /note="Description of Combined DNA/RNA Molecule: Synthetic oligonucleotide"
gauauaugcccccuggugatt

SEQ ID NO: 2114 - DNA, 21 bp, Artificial Sequence
  source: /note="Description of Artificial Sequence: Synthetic oligonucleotide"
  source: /note="Description of Combined DNA/RNA Molecule: Synthetic oligonucleotide"
ggugaaaaucgacacagcutt

SEQ ID NO: 2115 - DNA, 21 bp, Artificial Sequence
  source: /note="Description of Artificial Sequence: Synthetic oligonucleotide"
  source: /note="Description of Combined DNA/RNA Molecule: Synthetic oligonucleotide"
cgacacagcucuaauuaaatt

SEQ ID NO: 2116 - DNA, 21 bp, Artificial Sequence
  source: /note="Description of Artificial Sequence: Synthetic oligonucleotide"
  source: /note="Description of Combined DNA/RNA Molecule: Synthetic oligonucleotide"
gcucuaauuaaagcugacatt

SEQ ID NO: 2117 - DNA, 21 bp, Artificial Sequence
  source: /note="Description of Artificial Sequence: Synthetic oligonucleotide"
  source: /note="Description of Combined DNA/RNA Molecule: Synthetic oligonucleotide"
cugacaacuuucugcuugatt

SEQ ID NO: 2118 - DNA, 21 bp, Artificial Sequence
  source: /note="Description of Artificial Sequence: Synthetic oligonucleotide"
  source: /note="Description of Combined DNA/RNA Molecule: Synthetic oligonucleotide"
cuuucugcuugaaaauacatt

SEQ ID NO: 2119 - DNA, 21 bp, Artificial Sequence
  source: /note="Description of Artificial Sequence: Synthetic oligonucleotide"
  source: /note="Description of Combined DNA/RNA Molecule: Synthetic oligonucleotide"
aaaauacacugccagcccatt

SEQ ID NO: 2120 - DNA, 21 bp, Artificial Sequence
  source: /note="Description of Artificial Sequence: Synthetic oligonucleotide"
  source: /note="Description of Combined DNA/RNA Molecule: Synthetic oligonucleotide"
agcccagagcaccuuuacatt

SEQ ID NO: 2121 - DNA, 21 bp, Artificial Sequence
  source: /note="Description of Artificial Sequence: Synthetic oligonucleotide"
  source: /note="Description of Combined DNA/RNA Molecule: Synthetic oligonucleotide"
gcaccuuuacauuggccautt

SEQ ID NO: 2122 - DNA, 21 bp, Artificial Sequence
  source: /note="Description of Artificial Sequence: Synthetic oligonucleotide"
  source: /note="Description of Combined DNA/RNA Molecule: Synthetic oligonucleotide"
acauuggccauuucugcgutt

SEQ ID NO: 2123 - DNA, 21 bp, Artificial Sequence
  source: /note="Description of Artificial Sequence: Synthetic oligonucleotide"
  source: /note="Description of Combined DNA/RNA Molecule: Synthetic oligonucleotide"
cugcguaugcucuuucccutt

SEQ ID NO: 2124 - DNA, 21 bp, Artificial Sequence
  source: /note="Description of Artificial Sequence: Synthetic oligonucleotide"
  source: /note="Description of Combined DNA/RNA Molecule: Synthetic oligonucleotide"
cuuucccugggagauaaaatt

SEQ ID NO: 2125 - DNA, 21 bp, Artificial Sequence
  source: /note="Description of Artificial Sequence: Synthetic oligonucleotide"
  source: /note="Description of Combined DNA/RNA Molecule: Synthetic oligonucleotide"
gagauaaaacucacccacatt

SEQ ID NO: 2126 - DNA, 21 bp, Artificial Sequence
  source: /note="Description of Artificial Sequence: Synthetic oligonucleotide"
  source: /note="Description of Combined DNA/RNA Molecule: Synthetic oligonucleotide"
acucacccacaguuucguutt

SEQ ID NO: 2127 - DNA, 21 bp, Artificial Sequence
  source: /note="Description of Artificial Sequence: Synthetic oligonucleotide"
  source: /note="Description of Combined DNA/RNA Molecule: Synthetic oligonucleotide"
caguuucguucaauuguuutt

SEQ ID NO: 2128 - DNA, 21 bp, Artificial Sequence
  source: /note="Description of Artificial Sequence: Synthetic oligonucleotide"
  source: /note="Description of Combined DNA/RNA Molecule: Synthetic oligonucleotide"
caauuguuucagcuuugaatt

SEQ ID NO: 2129 - DNA, 21 bp, Artificial Sequence
  source: /note="Description of Artificial Sequence: Synthetic oligonucleotide"
  source: /note="Description of Combined DNA/RNA Molecule: Synthetic oligonucleotide"
cuuugaagagagaagcuuutt

SEQ ID NO: 2130 - DNA, 21 bp, Artificial Sequence
  source: /note="Description of Artificial Sequence: Synthetic oligonucleotide"
  source: /note="Description of Combined DNA/RNA Molecule: Synthetic oligonucleotide"
gagagaagcuuugguuaaatt

SEQ ID NO: 2131 - DNA, 21 bp, Artificial Sequence
  source: /note="Description of Artificial Sequence: Synthetic oligonucleotide"
  source: /note="Description of Combined DNA/RNA Molecule: Synthetic oligonucleotide"
guuaaagguaauccacccatt

SEQ ID NO: 2132 - DNA, 21 bp, Artificial Sequence
  source: /note="Description of Artificial Sequence: Synthetic oligonucleotide"
  source: /note="Description of Combined DNA/RNA Molecule: Synthetic oligonucleotide"
aauccacccauuuaucguutt

SEQ ID NO: 2133 - DNA, 21 bp, Artificial Sequence
  source: /note="Description of Artificial Sequence: Synthetic oligonucleotide"
  source: /note="Description of Combined DNA/RNA Molecule: Synthetic oligonucleotide"
cauuuaucguuuuuggaaatt

SEQ ID NO: 2134 - DNA, 21 bp, Artificial Sequence
  source: /note="Description of Artificial Sequence: Synthetic oligonucleotide"
  source: /note="Description of Combined DNA/RNA Molecule: Synthetic oligonucleotide"
uuuggaaagacaaucuucatt

SEQ ID NO: 2135 - DNA, 21 bp, Artificial Sequence
  source: /note="Description of Artificial Sequence: Synthetic oligonucleotide"
  source: /note="Description of Combined DNA/RNA Molecule: Synthetic oligonucleotide"
aaucuucagcauaaagacatt

SEQ ID NO: 2136 - DNA, 21 bp, Artificial Sequence
  source: /note="Description of Artificial Sequence: Synthetic oligonucleotide"
  source: /note="Description of Combined DNA/RNA Molecule: Synthetic oligonucleotide"
cucuguaccuaacacuggutt

SEQ ID NO: 2137 - DNA, 21 bp, Artificial Sequence
  source: /note="Description of Artificial Sequence: Synthetic oligonucleotide"
  source: /note="Description of Combined DNA/RNA Molecule: Synthetic oligonucleotide"
acacugguacggcacguautt

SEQ ID NO: 2138 - DNA, 21 bp, Artificial Sequence
  source: /note="Description of Artificial Sequence: Synthetic oligonucleotide"
  source: /note="Description of Combined DNA/RNA Molecule: Synthetic oligonucleotide"
ggcacguaugguagaaacatt

SEQ ID NO: 2139 - DNA, 21 bp, Artificial Sequence
  source: /note="Description of Artificial Sequence: Synthetic oligonucleotide"
  source: /note="Description of Combined DNA/RNA Molecule: Synthetic oligonucleotide"
gguagaaacaacugccuautt

SEQ ID NO: 2140 - DNA, 21 bp, Artificial Sequence
  source: /note="Description of Artificial Sequence: Synthetic oligonucleotide"
  source: /note="Description of Combined DNA/RNA Molecule: Synthetic oligonucleotide"
caacugccuaugcuuuacutt

SEQ ID NO: 2141 - DNA, 21 bp, Artificial Sequence
  source: /note="Description of Artificial Sequence: Synthetic oligonucleotide"
  source: /note="Description of Combined DNA/RNA Molecule: Synthetic oligonucleotide"
cuuuacucaccagucugaatt

SEQ ID NO: 2142 - DNA, 21 bp, Artificial Sequence
  source: /note="Description of Artificial Sequence: Synthetic oligonucleotide"
  source: /note="Description of Combined DNA/RNA Molecule: Synthetic oligonucleotide"
gucugaacuugaaagauautt

SEQ ID NO: 2143 - DNA, 21 bp, Artificial Sequence
  source: /note="Description of Artificial Sequence: Synthetic oligonucleotide"
  source: /note="Description of Combined DNA/RNA Molecule: Synthetic oligonucleotide"
acuugaaagauauaaauuatt

SEQ ID NO: 2144 - DNA, 21 bp, Artificial Sequence
  source: /note="Description of Artificial Sequence: Synthetic oligonucleotide"
  source: /note="Description of Combined DNA/RNA Molecule: Synthetic oligonucleotide"
uauaaauuauguuaacccatt

SEQ ID NO: 2145 - DNA, 21 bp, Artificial Sequence
  source: /note="Description of Artificial Sequence: Synthetic oligonucleotide"
  source: /note="Description of Combined DNA/RNA Molecule: Synthetic oligonucleotide"
guuaacccagucaucaaautt

SEQ ID NO: 2146 - DNA, 21 bp, Artificial Sequence
  source: /note="Description of Artificial Sequence: Synthetic oligonucleotide"
  source: /note="Description of Combined DNA/RNA Molecule: Synthetic oligonucleotide"
ucaucaaauggcuaucagatt

SEQ ID NO: 2147 - DNA, 21 bp, Artificial Sequence
  source: /note="Description of Artificial Sequence: Synthetic oligonucleotide"
  source: /note="Description of Combined DNA/RNA Molecule: Synthetic oligonucleotide"
uaucagaagagcagagguatt

SEQ ID NO: 2148 - DNA, 21 bp, Artificial Sequence
  source: /note="Description of Artificial Sequence: Synthetic oligonucleotide"
  source: /note="Description of Combined DNA/RNA Molecule: Synthetic oligonucleotide"
agagguauggagguggcuutt

SEQ ID NO: 2149 - DNA, 21 bp, Artificial Sequence
  source: /note="Description of Artificial Sequence: Synthetic oligonucleotide"
  source: /note="Description of Combined DNA/RNA Molecule: Synthetic oligonucleotide"
gagguggcuuuuauucaactt

SEQ ID NO: 2150 - DNA, 21 bp, Artificial Sequence
  source: /note="Description of Artificial Sequence: Synthetic oligonucleotide"
  source: /note="Description of Combined DNA/RNA Molecule: Synthetic oligonucleotide"
uauucaacccaggacacaatt

SEQ ID NO: 2151 - DNA, 21 bp, Artificial Sequence
  source: /note="Description of Artificial Sequence: Synthetic oligonucleotide"
  source: /note="Description of Combined DNA/RNA Molecule: Synthetic oligonucleotide"
aggacacaaucaaugccautt

SEQ ID NO: 2152 - DNA, 21 bp, Artificial Sequence
  source: /note="Description of Artificial Sequence: Synthetic oligonucleotide"
  source: /note="Description of Combined DNA/RNA Molecule: Synthetic oligonucleotide"
caaucaaugccauugagggtt

SEQ ID NO: 2153 - DNA, 21 bp, Artificial Sequence
  source: /note="Description of Artificial Sequence: Synthetic oligonucleotide"
  source: /note="Description of Combined DNA/RNA Molecule: Synthetic oligonucleotide"
cauugagggccugacggaatt

SEQ ID NO: 2154 - DNA, 21 bp, Artificial Sequence
  source: /note="Description of Artificial Sequence: Synthetic oligonucleotide"
  source: /note="Description of Combined DNA/RNA Molecule: Synthetic oligonucleotide"
acggaauauucacuccuggtt

SEQ ID NO: 2155 - DNA, 21 bp, Artificial Sequence
  source: /note="Description of Artificial Sequence: Synthetic oligonucleotide"
  source: /note="Description of Combined DNA/RNA Molecule: Synthetic oligonucleotide"
uucacuccugguuaaacaatt

SEQ ID NO: 2156 - DNA, 21 bp, Artificial Sequence
  source: /note="Description of Artificial Sequence: Synthetic oligonucleotide"
  source: /note="Description of Combined DNA/RNA Molecule: Synthetic oligonucleotide"
gguuaaacaacuccgcuugtt

SEQ ID NO: 2157 - DNA, 21 bp, Artificial Sequence
  source: /note="Description of Artificial Sequence: Synthetic oligonucleotide"
  source: /note="Description of Combined DNA/RNA Molecule: Synthetic oligonucleotide"
ccgcuugaguauggacauctt

SEQ ID NO: 2158 - DNA, 21 bp, Artificial Sequence
  source: /note="Description of Artificial Sequence: Synthetic oligonucleotide"
  source: /note="Description of Combined DNA/RNA Molecule: Synthetic oligonucleotide"
ggacaucgauguuucuuactt

SEQ ID NO: 2159 - DNA, 21 bp, Artificial Sequence
  source: /note="Description of Artificial Sequence: Synthetic oligonucleotide"
  source: /note="Description of Combined DNA/RNA Molecule: Synthetic oligonucleotide"
cgauguuucuuacaagcautt

SEQ ID NO: 2160 - DNA, 21 bp, Artificial Sequence
  source: /note="Description of Artificial Sequence: Synthetic oligonucleotide"
  source: /note="Description of Combined DNA/RNA Molecule: Synthetic oligonucleotide"
caagcauaaaggugccuuatt

SEQ ID NO: 2161 - DNA, 21 bp, Artificial Sequence
  source: /note="Description of Artificial Sequence: Synthetic oligonucleotide"
  source: /note="Description of Combined DNA/RNA Molecule: Synthetic oligonucleotide"
gugccuuacauaauuauaatt

SEQ ID NO: 2162 - DNA, 21 bp, Artificial Sequence
  source: /note="Description of Artificial Sequence: Synthetic oligonucleotide"
  source: /note="Description of Combined DNA/RNA Molecule: Synthetic oligonucleotide"
acauaauuauaaaaugacatt

SEQ ID NO: 2163 - DNA, 21 bp, Artificial Sequence
  source: /note="Description of Artificial Sequence: Synthetic oligonucleotide"
  source: /note="Description of Combined DNA/RNA Molecule: Synthetic oligonucleotide"
aaaaugacagacaagaauutt

SEQ ID NO: 2164 - DNA, 21 bp, Artificial Sequence
  source: /note="Description of Artificial Sequence: Synthetic oligonucleotide"
  source: /note="Description of Combined DNA/RNA Molecule: Synthetic oligonucleotide"
caagaauuuccuugggaggtt

SEQ ID NO: 2165 - DNA, 21 bp, Artificial Sequence
  source: /note="Description of Artificial Sequence: Synthetic oligonucleotide"
  source: /note="Description of Combined DNA/RNA Molecule: Synthetic oligonucleotide"
ccuugggaggccaguagagtt

SEQ ID NO: 2166 - DNA, 21 bp, Artificial Sequence
  source: /note="Description of Artificial Sequence: Synthetic oligonucleotide"
  source: /note="Description of Combined DNA/RNA Molecule: Synthetic oligonucleotide"
aguagaggugcuucucaautt

SEQ ID NO: 2167 - DNA, 21 bp, Artificial Sequence
  source: /note="Description of Artificial Sequence: Synthetic oligonucleotide"
  source: /note="Description of Combined DNA/RNA Molecule: Synthetic oligonucleotide"
cuucucaaugaugaccucatt

SEQ ID NO: 2168 - DNA, 21 bp, Artificial Sequence
  source: /note="Description of Artificial Sequence: Synthetic oligonucleotide"
  source: /note="Description of Combined DNA/RNA Molecule: Synthetic oligonucleotide"
ugaccucauugucaguacatt

SEQ ID NO: 2169 - DNA, 21 bp, Artificial Sequence
  source: /note="Description of Artificial Sequence: Synthetic oligonucleotide"
  source: /note="Description of Combined DNA/RNA Molecule: Synthetic oligonucleotide"
gucaguacaggauuuggcatt

SEQ ID NO: 2170 - DNA, 21 bp, Artificial Sequence
  source: /note="Description of Artificial Sequence: Synthetic oligonucleotide"
  source: /note="Description of Combined DNA/RNA Molecule: Synthetic oligonucleotide"
aggauuuggcaguggcuugtt

SEQ ID NO: 2171 - DNA, 21 bp, Artificial Sequence
  source: /note="Description of Artificial Sequence: Synthetic oligonucleotide"
  source: /note="Description of Combined DNA/RNA Molecule: Synthetic oligonucleotide"
uggcuuggcuacaguacautt

SEQ ID NO: 2172 - DNA, 21 bp, Artificial Sequence
  source: /note="Description of Artificial Sequence: Synthetic oligonucleotide"
  source: /note="Description of Combined DNA/RNA Molecule: Synthetic oligonucleotide"
gcuacaguacauguaacaatt

SEQ ID NO: 2173 - DNA, 21 bp, Artificial Sequence
  source: /note="Description of Artificial Sequence: Synthetic oligonucleotide"
  source: /note="Description of Combined DNA/RNA Molecule: Synthetic oligonucleotide"
aacaacuguaguucacaaatt

SEQ ID NO: 2174 - DNA, 21 bp, Artificial Sequence
  source: /note="Description of Artificial Sequence: Synthetic oligonucleotide"
  source: /note="Description of Combined DNA/RNA Molecule: Synthetic oligonucleotide"
guaguucacaaaaccaguatt

SEQ ID NO: 2175 - DNA, 21 bp, Artificial Sequence
  source: /note="Description of Artificial Sequence: Synthetic oligonucleotide"
  source: /note="Description of Combined DNA/RNA Molecule: Synthetic oligonucleotide"
aaaccaguaccucugaggatt

SEQ ID NO: 2176 - DNA, 21 bp, Artificial Sequence
  source: /note="Description of Artificial Sequence: Synthetic oligonucleotide"
  source: /note="Description of Combined DNA/RNA Molecule: Synthetic oligonucleotide"
ugaggaaguuugcagcuuutt

SEQ ID NO: 2177 - DNA, 21 bp, Artificial Sequence
  source: /note="Description of Artificial Sequence: Synthetic oligonucleotide"
  source: /note="Description of Combined DNA/RNA Molecule: Synthetic oligonucleotide"
ugcagcuuuuauuugaaaatt

SEQ ID NO: 2178 - DNA, 21 bp, Artificial Sequence
  source: /note="Description of Artificial Sequence: Synthetic oligonucleotide"
  source: /note="Description of Combined DNA/RNA Molecule: Synthetic oligonucleotide"
auuugaaaaucgauacucatt

SEQ ID NO: 2179 - DNA, 21 bp, Artificial Sequence
  source: /note="Description of Artificial Sequence: Synthetic oligonucleotide"
  source: /note="Description of Combined DNA/RNA Molecule: Synthetic oligonucleotide"
cgauacucaggauauugaatt

SEQ ID NO: 2180 - DNA, 21 bp, Artificial Sequence
  source: /note="Description of Artificial Sequence: Synthetic oligonucleotide"
  source: /note="Description of Combined DNA/RNA Molecule: Synthetic oligonucleotide"
ggauauugaagcaucccactt

SEQ ID NO: 2181 - DNA, 21 bp, Artificial Sequence
  source: /note="Description of Artificial Sequence: Synthetic oligonucleotide"
  source: /note="Description of Combined DNA/RNA Molecule: Synthetic oligonucleotide"
gaagcaucccacuacagagtt

SEQ ID NO: 2182 - DNA, 21 bp, Artificial Sequence
  source: /note="Description of Artificial Sequence: Synthetic oligonucleotide"
  source: /note="Description of Combined DNA/RNA Molecule: Synthetic oligonucleotide"
acuacagaggcuacggaaatt

SEQ ID NO: 2183 - DNA, 21 bp, Artificial Sequence
  source: /note="Description of Artificial Sequence: Synthetic oligonucleotide"
  source: /note="Description of Combined DNA/RNA Molecule: Synthetic oligonucleotide"
cggaaacucugauuacaaatt

SEQ ID NO: 2184 - DNA, 21 bp, Artificial Sequence
  source: /note="Description of Artificial Sequence: Synthetic oligonucleotide"
  source: /note="Description of Combined DNA/RNA Molecule: Synthetic oligonucleotide"
ugauuacaaacgcauaguatt

SEQ ID NO: 2185 - DNA, 21 bp, Artificial Sequence
  source: /note="Description of Artificial Sequence: Synthetic oligonucleotide"
  source: /note="Description of Combined DNA/RNA Molecule: Synthetic oligonucleotide"
gcauaguagcaugugccagtt

SEQ ID NO: 2186 - DNA, 21 bp, Artificial Sequence
  source: /note="Description of Artificial Sequence: Synthetic oligonucleotide"
  source: /note="Description of Combined DNA/RNA Molecule: Synthetic oligonucleotide"
gcaugugccagcuacaagctt

SEQ ID NO: 2187 - DNA, 21 bp, Artificial Sequence
  source: /note="Description of Artificial Sequence: Synthetic oligonucleotide"
  source: /note="Description of Combined DNA/RNA Molecule: Synthetic oligonucleotide"
cuacaagcccagcagggaatt

SEQ ID NO: 2188 - DNA, 21 bp, Artificial Sequence
  source: /note="Description of Artificial Sequence: Synthetic oligonucleotide"
  source: /note="Description of Combined DNA/RNA Molecule: Synthetic oligonucleotide"
cagcagggaagaaucaucatt

SEQ ID NO: 2189 - DNA, 21 bp, Artificial Sequence
  source: /note="Description of Artificial Sequence: Synthetic oligonucleotide"
  source: /note="Description of Combined DNA/RNA Molecule: Synthetic oligonucleotide"
gaaucaucaucuggauccutt

SEQ ID NO: 2190 - DNA, 21 bp, Artificial Sequence
  source: /note="Description of Artificial Sequence: Synthetic oligonucleotide"
  source: /note="Description of Combined DNA/RNA Molecule: Synthetic oligonucleotide"
gauccucucaugcggugautt

SEQ ID NO: 2191 - DNA, 21 bp, Artificial Sequence
  source: /note="Description of Artificial Sequence: Synthetic oligonucleotide"
  source: /note="Description of Combined DNA/RNA Molecule: Synthetic oligonucleotide"
cucaugcggugauggacautt

SEQ ID NO: 2192 - DNA, 21 bp, Artificial Sequence
  source: /note="Description of Artificial Sequence: Synthetic oligonucleotide"
  source: /note="Description of Combined DNA/RNA Molecule: Synthetic oligonucleotide"
gauggacaucuccuugccutt

SEQ ID NO: 2193 - DNA, 21 bp, Artificial Sequence
  source: /note="Description of Artificial Sequence: Synthetic oligonucleotide"
  source: /note="Description of Combined DNA/RNA Molecule: Synthetic oligonucleotide"
cuugccuacuggaaucagutt

SEQ ID NO: 2194 - DNA, 21 bp, Artificial Sequence
  source: /note="Description of Artificial Sequence: Synthetic oligonucleotide"
  source: /note="Description of Combined DNA/RNA Molecule: Synthetic oligonucleotide"
gaaucagugcaaaugaagatt

SEQ ID NO: 2195 - DNA, 21 bp, Artificial Sequence
  source: /note="Description of Artificial Sequence: Synthetic oligonucleotide"
  source: /note="Description of Combined DNA/RNA Molecule: Synthetic oligonucleotide"
aaaugaagaagacuuaaaatt

SEQ ID NO: 2196 - DNA, 21 bp, Artificial Sequence
  source: /note="Description of Artificial Sequence: Synthetic oligonucleotide"
  source: /note="Description of Combined DNA/RNA Molecule: Synthetic oligonucleotide"
gaagacuuaaaagcccuugtt

SEQ ID NO: 2197 - DNA, 21 bp, Artificial Sequence
  source: /note="Description of Artificial Sequence: Synthetic oligonucleotide"
  source: /note="Description of Combined DNA/RNA Molecule: Synthetic oligonucleotide"
ccuuguggaagggguggautt

SEQ ID NO: 2198 - DNA, 21 bp, Artificial Sequence
  source: /note="Description of Artificial Sequence: Synthetic oligonucleotide"
  source: /note="Description of Combined DNA/RNA Molecule: Synthetic oligonucleotide"
gaagggguggaucaacuautt

SEQ ID NO: 2199 - DNA, 21 bp, Artificial Sequence
  source: /note="Description of Artificial Sequence: Synthetic oligonucleotide"
  source: /note="Description of Combined DNA/RNA Molecule: Synthetic oligonucleotide"
aucaacuauucacugauuatt

SEQ ID NO: 2200 - DNA, 21 bp, Artificial Sequence
  source: /note="Description of Artificial Sequence: Synthetic oligonucleotide"
  source: /note="Description of Combined DNA/RNA Molecule: Synthetic oligonucleotide"
cacugauuaccaaaucaaatt

SEQ ID NO: 2201 - DNA, 21 bp, Artificial Sequence
  source: /note="Description of Artificial Sequence: Synthetic oligonucleotide"
  source: /note="Description of Combined DNA/RNA Molecule: Synthetic oligonucleotide"
aucaaagauggacauguuatt

SEQ ID NO: 2202 - DNA, 21 bp, Artificial Sequence
  source: /note="Description of Artificial Sequence: Synthetic oligonucleotide"
  source: /note="Description of Combined DNA/RNA Molecule: Synthetic oligonucleotide"
ggacauguuauucugcaactt

SEQ ID NO: 2203 - DNA, 21 bp, Artificial Sequence
  source: /note="Description of Artificial Sequence: Synthetic oligonucleotide"
  source: /note="Description of Combined DNA/RNA Molecule: Synthetic oligonucleotide"
ucugcaacugaauucgauutt

SEQ ID NO: 2204 - DNA, 21 bp, Artificial Sequence
  source: /note="Description of Artificial Sequence: Synthetic oligonucleotide"
  source: /note="Description of Combined DNA/RNA Molecule: Synthetic oligonucleotide"
gaauucgauucccuccagutt

SEQ ID NO: 2205 - DNA, 21 bp, Artificial Sequence
  source: /note="Description of Artificial Sequence: Synthetic oligonucleotide"
  source: /note="Description of Combined DNA/RNA Molecule: Synthetic oligonucleotide"
cccuccagugauuuccuuutt

SEQ ID NO: 2206 - DNA, 21 bp, Artificial Sequence
  source: /note="Description of Artificial Sequence: Synthetic oligonucleotide"
  source: /note="Description of Combined DNA/RNA Molecule: Synthetic oligonucleotide"
gauuuccuuuguguacgautt

SEQ ID NO: 2207 - DNA, 21 bp, Artificial Sequence
  source: /note="Description of Artificial Sequence: Synthetic oligonucleotide"
  source: /note="Description of Combined DNA/RNA Molecule: Synthetic oligonucleotide"
guacgauuccggauauuugtt

SEQ ID NO: 2208 - DNA, 21 bp, Artificial Sequence
  source: /note="Description of Artificial Sequence: Synthetic oligonucleotide"
  source: /note="Description of Combined DNA/RNA Molecule: Synthetic oligonucleotide"
cggauauuugaacucuuugtt

SEQ ID NO: 2209 - DNA, 21 bp, Artificial Sequence
  source: /note="Description of Artificial Sequence: Synthetic oligonucleotide"
  source: /note="Description of Combined DNA/RNA Molecule: Synthetic oligonucleotide"
acucuuugaaguuggguuutt

SEQ ID NO: 2210 - DNA, 21 bp, Artificial Sequence
  source: /note="Description of Artificial Sequence: Synthetic oligonucleotide"
  source: /note="Description of Combined DNA/RNA Molecule: Synthetic oligonucleotide"
aguuggguuucucaguccutt

SEQ ID NO: 2211 - DNA, 21 bp, Artificial Sequence
  source: /note="Description of Artificial Sequence: Synthetic oligonucleotide"
  source: /note="Description of Combined DNA/RNA Molecule: Synthetic oligonucleotide"
uucucaguccugccacuuutt

SEQ ID NO: 2212 - DNA, 21 bp, Artificial Sequence
  source: /note="Description of Artificial Sequence: Synthetic oligonucleotide"
  source: /note="Description of Combined DNA/RNA Molecule: Synthetic oligonucleotide"
cacuuucacaguguacgaatt

SEQ ID NO: 2213 - DNA, 21 bp, Artificial Sequence
  source: /note="Description of Artificial Sequence: Synthetic oligonucleotide"
  source: /note="Description of Combined DNA/RNA Molecule: Synthetic oligonucleotide"
cacaguguacgaauaccactt

SEQ ID NO: 2214 - DNA, 21 bp, Artificial Sequence
  source: /note="Description of Artificial Sequence: Synthetic oligonucleotide"
  source: /note="Description of Combined DNA/RNA Molecule: Synthetic oligonucleotide"
accacagaccagauaaacatt

SEQ ID NO: 2215 - DNA, 21 bp, Artificial Sequence
  source: /note="Description of Artificial Sequence: Synthetic oligonucleotide"
  source: /note="Description of Combined DNA/RNA Molecule: Synthetic oligonucleotide"
ccagauaaacaguguaccatt

SEQ ID NO: 2216 - DNA, 21 bp, Artificial Sequence
  source: /note="Description of Artificial Sequence: Synthetic oligonucleotide"
  source: /note="Description of Combined DNA/RNA Molecule: Synthetic oligonucleotide"
caguguaccauguuuuauatt

SEQ ID NO: 2217 - DNA, 21 bp, Artificial Sequence
  source: /note="Description of Artificial Sequence: Synthetic oligonucleotide"
  source: /note="Description of Combined DNA/RNA Molecule: Synthetic oligonucleotide"
guuuuauagcacuuccaautt

SEQ ID NO: 2218 - DNA, 21 bp, Artificial Sequence
  source: /note="Description of Artificial Sequence: Synthetic oligonucleotide"
  source: /note="Description of Combined DNA/RNA Molecule: Synthetic oligonucleotide"
cuuccaauaucaaaauucatt

SEQ ID NO: 2219 - DNA, 21 bp, Artificial Sequence
  source: /note="Description of Artificial Sequence: Synthetic oligonucleotide"
  source: /note="Description of Combined DNA/RNA Molecule: Synthetic oligonucleotide"
aucaaaauucagaaagucutt

SEQ ID NO: 2220 - DNA, 21 bp, Artificial Sequence
  source: /note="Description of Artificial Sequence: Synthetic oligonucleotide"
  source: /note="Description of Combined DNA/RNA Molecule: Synthetic oligonucleotide"
gaaagucugugaaggagcctt

SEQ ID NO: 2221 - DNA, 21 bp, Artificial Sequence
  source: /note="Description of Artificial Sequence: Synthetic oligonucleotide"
  source: /note="Description of Combined DNA/RNA Molecule: Synthetic oligonucleotide"
gaaggagccgcgugcaagutt

SEQ ID NO: 2222 - DNA, 21 bp, Artificial Sequence
  source: /note="Description of Artificial Sequence: Synthetic oligonucleotide"
  source: /note="Description of Combined DNA/RNA Molecule: Synthetic oligonucleotide"
cgugcaaguguguagaagctt

SEQ ID NO: 2223 - DNA, 21 bp, Artificial Sequence
  source: /note="Description of Artificial Sequence: Synthetic oligonucleotide"
  source: /note="Description of Combined DNA/RNA Molecule: Synthetic oligonucleotide"
guagaagcugauugugggctt

SEQ ID NO: 2224 - DNA, 21 bp, Artificial Sequence
  source: /note="Description of Artificial Sequence: Synthetic oligonucleotide"
  source: /note="Description of Combined DNA/RNA Molecule: Synthetic oligonucleotide"
cugauugugggcaaaugcatt

SEQ ID NO: 2225 - DNA, 21 bp, Artificial Sequence
  source: /note="Description of Artificial Sequence: Synthetic oligonucleotide"
  source: /note="Description of Combined DNA/RNA Molecule: Synthetic oligonucleotide"
gcaaaugcaggaagaauugtt

SEQ ID NO: 2226 - DNA, 21 bp, Artificial Sequence
  source: /note="Description of Artificial Sequence: Synthetic oligonucleotide"
  source: /note="Description of Combined DNA/RNA Molecule: Synthetic oligonucleotide"
gaagaauuggaucugacaatt

SEQ ID NO: 2227 - DNA, 21 bp, Artificial Sequence
  source: /note="Description of Artificial Sequence: Synthetic oligonucleotide"
  source: /note="Description of Combined DNA/RNA Molecule: Synthetic oligonucleotide"
cugacaaucucugcagagatt

SEQ ID NO: 2228 - DNA, 21 bp, Artificial Sequence
  source: /note="Description of Artificial Sequence: Synthetic oligonucleotide"
  source: /note="Description of Combined DNA/RNA Molecule: Synthetic oligonucleotide"
gcagagacaagaaaacaaatt

SEQ ID NO: 2229 - DNA, 21 bp, Artificial Sequence
  source: /note="Description of Artificial Sequence: Synthetic oligonucleotide"
  source: /note="Description of Combined DNA/RNA Molecule: Synthetic oligonucleotide"
caagaaaacaaacagcaugtt

SEQ ID NO: 2230 - DNA, 21 bp, Artificial Sequence
  source: /note="Description of Artificial Sequence: Synthetic oligonucleotide"
  source: /note="Description of Combined DNA/RNA Molecule: Synthetic oligonucleotide"
acagcauguaaaccagagatt

SEQ ID NO: 2231 - DNA, 21 bp, Artificial Sequence
  source: /note="Description of Artificial Sequence: Synthetic oligonucleotide"
  source: /note="Description of Combined DNA/RNA Molecule: Synthetic oligonucleotide"
ccagagauugcauaugcuutt

SEQ ID NO: 2232 - DNA, 21 bp, Artificial Sequence
  source: /note="Description of Artificial Sequence: Synthetic oligonucleotide"
  source: /note="Description of Combined DNA/RNA Molecule: Synthetic oligonucleotide"
gcauaugcuuauaaaguuatt

SEQ ID NO: 2233 - DNA, 21 bp, Artificial Sequence
  source: /note="Description of Artificial Sequence: Synthetic oligonucleotide"
  source: /note="Description of Combined DNA/RNA Molecule: Synthetic oligonucleotide"
uuauaaaguuagcaucacatt

SEQ ID NO: 2234 - DNA, 21 bp, Artificial Sequence
  source: /note="Description of Artificial Sequence: Synthetic oligonucleotide"
  source: /note="Description of Combined DNA/RNA Molecule: Synthetic oligonucleotide"
caucacauccaucacuguatt

SEQ ID NO: 2235 - DNA, 21 bp, Artificial Sequence
  source: /note="Description of Artificial Sequence: Synthetic oligonucleotide"
  source: /note="Description of Combined DNA/RNA Molecule: Synthetic oligonucleotide"
ucacuguagaaaauguuuutt

SEQ ID NO: 2236 - DNA, 21 bp, Artificial Sequence
  source: /note="Description of Artificial Sequence: Synthetic oligonucleotide"
  source: /note="Description of Combined DNA/RNA Molecule: Synthetic oligonucleotide"
agaaaauguuuuugucaagtt

SEQ ID NO: 2237 - DNA, 21 bp, Artificial Sequence
  source: /note="Description of Artificial Sequence: Synthetic oligonucleotide"
  source: /note="Description of Combined DNA/RNA Molecule: Synthetic oligonucleotide"
uuugucaaguacaaggcaatt

SEQ ID NO: 2238 - DNA, 21 bp, Artificial Sequence
  source: /note="Description of Artificial Sequence: Synthetic oligonucleotide"
  source: /note="Description of Combined DNA/RNA Molecule: Synthetic oligonucleotide"
aggcaacccuucuggauautt

SEQ ID NO: 2239 - DNA, 21 bp, Artificial Sequence
  source: /note="Description of Artificial Sequence: Synthetic oligonucleotide"
  source: /note="Description of Combined DNA/RNA Molecule: Synthetic oligonucleotide"
ccuucuggauaucuacaaatt

SEQ ID NO: 2240 - DNA, 21 bp, Artificial Sequence
  source: /note="Description of Artificial Sequence: Synthetic oligonucleotide"
  source: /note="Description of Combined DNA/RNA Molecule: Synthetic oligonucleotide"
uaucuacaaaacuggggaatt

SEQ ID NO: 2241 - DNA, 21 bp, Artificial Sequence
  source: /note="Description of Artificial Sequence: Synthetic oligonucleotide"
  source: /note="Description of Combined DNA/RNA Molecule: Synthetic oligonucleotide"
cuggggaagcuguugcugatt

SEQ ID NO: 2242 - DNA, 21 bp, Artificial Sequence
  source: /note="Description of Artificial Sequence: Synthetic oligonucleotide"
  source: /note="Description of Combined DNA/RNA Molecule: Synthetic oligonucleotide"
cuguugcugagaaagacuctt

SEQ ID NO: 2243 - DNA, 21 bp, Artificial Sequence
  source: /note="Description of Artificial Sequence: Synthetic oligonucleotide"
  source: /note="Description of Combined DNA/RNA Molecule: Synthetic oligonucleotide"
gacucugagauuaccuucatt

SEQ ID NO: 2244 - DNA, 21 bp, Artificial Sequence
  source: /note="Description of Artificial Sequence: Synthetic oligonucleotide"
  source: /note="Description of Combined DNA/RNA Molecule: Synthetic oligonucleotide"
gagauuaccuucauuaaaatt

SEQ ID NO: 2245 - DNA, 21 bp, Artificial Sequence
  source: /note="Description of Artificial Sequence: Synthetic oligonucleotide"
  source: /note="Description of Combined DNA/RNA Molecule: Synthetic oligonucleotide"
auuaaaaagguaaccuguatt

SEQ ID NO: 2246 - DNA, 21 bp, Artificial Sequence
  source: /note="Description of Artificial Sequence: Synthetic oligonucleotide"
  source: /note="Description of Combined DNA/RNA Molecule: Synthetic oligonucleotide"
uaaccuguacuaacgcugatt

SEQ ID NO: 2247 - DNA, 21 bp, Artificial Sequence
  source: /note="Description of Artificial Sequence: Synthetic oligonucleotide"
  source: /note="Description of Combined DNA/RNA Molecule: Synthetic oligonucleotide"
cuaacgcugagcugguaaatt

SEQ ID NO: 2248 - DNA, 21 bp, Artificial Sequence
  source: /note="Description of Artificial Sequence: Synthetic oligonucleotide"
  source: /note="Description of Combined DNA/RNA Molecule: Synthetic oligonucleotide"
gguaaaaggaagacaguactt

SEQ ID NO: 2249 - DNA, 21 bp, Artificial Sequence
  source: /note="Description of Artificial Sequence: Synthetic oligonucleotide"
  source: /note="Description of Combined DNA/RNA Molecule: Synthetic oligonucleotide"
gaagacaguacuuaauuautt

SEQ ID NO: 2250 - DNA, 21 bp, Artificial Sequence
  source: /note="Description of Artificial Sequence: Synthetic oligonucleotide"
  source: /note="Description of Combined DNA/RNA Molecule: Synthetic oligonucleotide"
cuuaauuauggguaaagaatt

SEQ ID NO: 2251 - DNA, 21 bp, Artificial Sequence
  source: /note="Description of Artificial Sequence: Synthetic oligonucleotide"
  source: /note="Description of Combined DNA/RNA Molecule: Synthetic oligonucleotide"
uaaagaagcccuccagauatt

SEQ ID NO: 2252 - DNA, 21 bp, Artificial Sequence
  source: /note="Description of Artificial Sequence: Synthetic oligonucleotide"
  source: /note="Description of Combined DNA/RNA Molecule: Synthetic oligonucleotide"
ccuccagauaaaauacaautt

SEQ ID NO: 2253 - DNA, 21 bp, Artificial Sequence
  source: /note="Description of Artificial Sequence: Synthetic oligonucleotide"
  source: /note="Description of Combined DNA/RNA Molecule: Synthetic oligonucleotide"
aaauacaauuucaguuucatt

SEQ ID NO: 2254 - DNA, 21 bp, Artificial Sequence
  source: /note="Description of Artificial Sequence: Synthetic oligonucleotide"
  source: /note="Description of Combined DNA/RNA Molecule: Synthetic oligonucleotide"
caguuucagguacaucuactt

SEQ ID NO: 2255 - DNA, 21 bp, Artificial Sequence
  source: /note="Description of Artificial Sequence: Synthetic oligonucleotide"
  source: /note="Description of Combined DNA/RNA Molecule: Synthetic oligonucleotide"
gguacaucuacccuuuagatt

SEQ ID NO: 2256 - DNA, 21 bp, Artificial Sequence
  source: /note="Description of Artificial Sequence: Synthetic oligonucleotide"
  source: /note="Description of Combined DNA/RNA Molecule: Synthetic oligonucleotide"
ccuuuagauuccuugaccutt

SEQ ID NO: 2257 - DNA, 21 bp, Artificial Sequence
  source: /note="Description of Artificial Sequence: Synthetic oligonucleotide"
  source: /note="Description of Combined DNA/RNA Molecule: Synthetic oligonucleotide"
ccuugaccuggauugaauatt

SEQ ID NO: 2258 - DNA, 21 bp, Artificial Sequence
  source: /note="Description of Artificial Sequence: Synthetic oligonucleotide"
  source: /note="Description of Combined DNA/RNA Molecule: Synthetic oligonucleotide"
ggauugaauacuggccuagtt

SEQ ID NO: 2259 - DNA, 21 bp, Artificial Sequence
  source: /note="Description of Artificial Sequence: Synthetic oligonucleotide"
  source: /note="Description of Combined DNA/RNA Molecule: Synthetic oligonucleotide"
cuggccuagagacacaacatt

SEQ ID NO: 2260 - DNA, 21 bp, Artificial Sequence
  source: /note="Description of Artificial Sequence: Synthetic oligonucleotide"
  source: /note="Description of Combined DNA/RNA Molecule: Synthetic oligonucleotide"
gagacacaacauguucauctt

SEQ ID NO: 2261 - DNA, 21 bp, Artificial Sequence
  source: /note="Description of Artificial Sequence: Synthetic oligonucleotide"
  source: /note="Description of Combined DNA/RNA Molecule: Synthetic oligonucleotide"
guucaucgugucaagcauutt

SEQ ID NO: 2262 - DNA, 21 bp, Artificial Sequence
  source: /note="Description of Artificial Sequence: Synthetic oligonucleotide"
  source: /note="Description of Combined DNA/RNA Molecule: Synthetic oligonucleotide"
gucaagcauuuuuagcuaatt

SEQ ID NO: 2263 - DNA, 21 bp, Artificial Sequence
  source: /note="Description of Artificial Sequence: Synthetic oligonucleotide"
  source: /note="Description of Combined DNA/RNA Molecule: Synthetic oligonucleotide"
agcuaauuuagaugaauuutt

SEQ ID NO: 2264 - DNA, 21 bp, Artificial Sequence
  source: /note="Description of Artificial Sequence: Synthetic oligonucleotide"
  source: /note="Description of Combined DNA/RNA Molecule: Synthetic oligonucleotide"
agaugaauuugccgaagautt

SEQ ID NO: 2265 - DNA, 21 bp, Artificial Sequence
  source: /note="Description of Artificial Sequence: Synthetic oligonucleotide"
  source: /note="Description of Combined DNA/RNA Molecule: Synthetic oligonucleotide"
ccgaagauaucuuuuuaaatt

SEQ ID NO: 2266 - DNA, 21 bp, Artificial Sequence
  source: /note="Description of Artificial Sequence: Synthetic oligonucleotide"
  source: /note="Description of Combined DNA/RNA Molecule: Synthetic oligonucleotide"
cuuuuuaaauggaugcuaatt

SEQ ID NO: 2267 - DNA, 21 bp, Artificial Sequence
  source: /note="Description of Artificial Sequence: Synthetic oligonucleotide"
  source: /note="Description of Combined DNA/RNA Molecule: Synthetic oligonucleotide"
ggaugcuaaaauuccugaatt

SEQ ID NO: 2268 - DNA, 21 bp, Artificial Sequence
  source: /note="Description of Artificial Sequence: Synthetic oligonucleotide"
  source: /note="Description of Combined DNA/RNA Molecule: Synthetic oligonucleotide"
uaaaauuccugaaguucagtt

SEQ ID NO: 2269 - DNA, 21 bp, Artificial Sequence
  source: /note="Description of Artificial Sequence: Synthetic oligonucleotide"
  source: /note="Description of Combined DNA/RNA Molecule: Synthetic oligonucleotide"
aguucagcugcauacaguutt

SEQ ID NO: 2270 - DNA, 21 bp, Artificial Sequence
  source: /note="Description of Artificial Sequence: Synthetic oligonucleotide"
  source: /note="Description of Combined DNA/RNA Molecule: Synthetic oligonucleotide"
gcauacaguuugcacuuautt

SEQ ID NO: 2271 - DNA, 21 bp, Artificial Sequence
  source: /note="Description of Artificial Sequence: Synthetic oligonucleotide"
  source: /note="Description of Combined DNA/RNA Molecule: Synthetic oligonucleotide"
acuuauggacuccuguugutt

SEQ ID NO: 2272 - DNA, 21 bp, Artificial Sequence
  source: /note="Description of Artificial Sequence: Synthetic oligonucleotide"
  source: /note="Description of Combined DNA/RNA Molecule: Synthetic oligonucleotide"
ggacuccuguuguugaagutt

SEQ ID NO: 2273 - DNA, 21 bp, Artificial Sequence
  source: /note="Description of Artificial Sequence: Synthetic oligonucleotide"
  source: /note="Description of Combined DNA/RNA Molecule: Synthetic oligonucleotide"
uguugaaguucguuuuuuutt

SEQ ID NO: 2274 - DNA, 21 bp, Artificial Sequence
  source: /note="Description of Artificial Sequence: Synthetic oligonucleotide"
  source: /note="Description of Combined DNA/RNA Molecule: Synthetic oligonucleotide"
uuuuuuguuuucuucuuuutt

SEQ ID NO: 2275 - DNA, 21 bp, Artificial Sequence
  source: /note="Description of Artificial Sequence: Synthetic oligonucleotide"
  source: /note="Description of Combined DNA/RNA Molecule: Synthetic oligonucleotide"
ucuucuuuuuuuaaacauutt

SEQ ID NO: 2276 - DNA, 21 bp, Artificial Sequence
  source: /note="Description of Artificial Sequence: Synthetic oligonucleotide"
  source: /note="Description of Combined DNA/RNA Molecule: Synthetic oligonucleotide"
uuuuuaaacauucauagcutt

SEQ ID NO: 2277 - DNA, 21 bp, Artificial Sequence
  source: /note="Description of Artificial Sequence: Synthetic oligonucleotide"
  source: /note="Description of Combined DNA/RNA Molecule: Synthetic oligonucleotide"
auagcuggucuuauuuguatt

SEQ ID NO: 2278 - DNA, 21 bp, Artificial Sequence
  source: /note="Description of Artificial Sequence: Synthetic oligonucleotide"
  source: /note="Description of Combined DNA/RNA Molecule: Synthetic oligonucleotide"
gucuuauuuguaaagcucatt

SEQ ID NO: 2279 - DNA, 21 bp, Artificial Sequence
  source: /note="Description of Artificial Sequence: Synthetic oligonucleotide"
  source: /note="Description of Combined DNA/RNA Molecule: Synthetic oligonucleotide"
aaagcucacuuuacuuagatt

SEQ ID NO: 2280 - DNA, 21 bp, Artificial Sequence
  source: /note="Description of Artificial Sequence: Synthetic oligonucleotide"
  source: /note="Description of Combined DNA/RNA Molecule: Synthetic oligonucleotide"
acuuagaauuaguggcacutt

SEQ ID NO: 2281 - DNA, 21 bp, Artificial Sequence
  source: /note="Description of Artificial Sequence: Synthetic oligonucleotide"
  source: /note="Description of Combined DNA/RNA Molecule: Synthetic oligonucleotide"
aguggcacuugcuuuuauutt

SEQ ID NO: 2282 - DNA, 21 bp, Artificial Sequence
  source: /note="Description of Artificial Sequence: Synthetic oligonucleotide"
  source: /note="Description of Combined DNA/RNA Molecule: Synthetic oligonucleotide"
gcuuuuauuagagaaugautt

SEQ ID NO: 2283 - DNA, 21 bp, Artificial Sequence
  source: /note="Description of Artificial Sequence: Synthetic oligonucleotide"
  source: /note="Description of Combined DNA/RNA Molecule: Synthetic oligonucleotide"
gagaaugauuucaaaugcutt

SEQ ID NO: 2284 - DNA, 21 bp, Artificial Sequence
  source: /note="Description of Artificial Sequence: Synthetic oligonucleotide"
  source: /note="Description of Combined DNA/RNA Molecule: Synthetic oligonucleotide"
uuucaaaugcuguaacuuutt

SEQ ID NO: 2285 - DNA, 21 bp, Artificial Sequence
  source: /note="Description of Artificial Sequence: Synthetic oligonucleotide"
  source: /note="Description of Combined DNA/RNA Molecule: Synthetic oligonucleotide"
guaacuuucugaaauaacatt

SEQ ID NO: 2286 - DNA, 21 bp, Artificial Sequence
  source: /note="Description of Artificial Sequence: Synthetic oligonucleotide"
  source: /note="Description of Combined DNA/RNA Molecule: Synthetic oligonucleotide"
gaaauaacauggccuuggatt

SEQ ID NO: 2287 - DNA, 21 bp, Artificial Sequence
  source: /note="Description of Artificial Sequence: Synthetic oligonucleotide"
  source: /note="Description of Combined DNA/RNA Molecule: Synthetic oligonucleotide"
ccuuggagggcaugaagactt

SEQ ID NO: 2288 - DNA, 21 bp, Artificial Sequence
  source: /note="Description of Artificial Sequence: Synthetic oligonucleotide"
  source: /note="Description of Combined DNA/RNA Molecule: Synthetic oligonucleotide"
agggcaugaagacagauactt

SEQ ID NO: 2289 - DNA, 21 bp, Artificial Sequence
  source: /note="Description of Artificial Sequence: Synthetic oligonucleotide"
  source: /note="Description of Combined DNA/RNA Molecule: Synthetic oligonucleotide"
gauacuccuccaagguuautt

SEQ ID NO: 2290 - DNA, 21 bp, Artificial Sequence
  source: /note="Description of Artificial Sequence: Synthetic oligonucleotide"
  source: /note="Description of Combined DNA/RNA Molecule: Synthetic oligonucleotide"
ccuccaagguuauuggacatt

SEQ ID NO: 2291 - DNA, 21 bp, Artificial Sequence
  source: /note="Description of Artificial Sequence: Synthetic oligonucleotide"
  source: /note="Description of Combined DNA/RNA Molecule: Synthetic oligonucleotide"
ggacaccggaaacaauaaatt

SEQ ID NO: 2292 - DNA, 21 bp, Artificial Sequence
  source: /note="Description of Artificial Sequence: Synthetic oligonucleotide"
  source: /note="Description of Combined DNA/RNA Molecule: Synthetic oligonucleotide"
gaaacaauaaauuggaacatt

SEQ ID NO: 2293 - DNA, 21 bp, Artificial Sequence
  source: /note="Description of Artificial Sequence: Synthetic oligonucleotide"
  source: /note="Description of Combined DNA/RNA Molecule: Synthetic oligonucleotide"
auuggaacaccuccucaaatt

SEQ ID NO: 2294 - DNA, 21 bp, Artificial Sequence
  source: /note="Description of Artificial Sequence: Synthetic oligonucleotide"
  source: /note="Description of Combined DNA/RNA Molecule: Synthetic oligonucleotide"
uccucaaaccuaccacucatt

SEQ ID NO: 2295 - DNA, 21 bp, Artificial Sequence
  source: /note="Description of Artificial Sequence: Synthetic oligonucleotide"
  source: /note="Description of Combined DNA/RNA Molecule: Synthetic oligonucleotide"
cuaccacucaggaauguuutt

SEQ ID NO: 2296 - DNA, 21 bp, Artificial Sequence
  source: /note="Description of Artificial Sequence: Synthetic oligonucleotide"
  source: /note="Description of Combined DNA/RNA Molecule: Synthetic oligonucleotide"
aauguuugcuggggccgaatt

SEQ ID NO: 2297 - DNA, 21 bp, Artificial Sequence
  source: /note="Description of Artificial Sequence: Synthetic oligonucleotide"
  source: /note="Description of Combined DNA/RNA Molecule: Synthetic oligonucleotide"
ugcuggggccgaaagaacatt

SEQ ID NO: 2298 - DNA, 21 bp, Artificial Sequence
  source: /note="Description of Artificial Sequence: Synthetic oligonucleotide"
  source: /note="Description of Combined DNA/RNA Molecule: Synthetic oligonucleotide"
aaagaacaguccauugaaatt

SEQ ID NO: 2299 - DNA, 21 bp, Artificial Sequence
  source: /note="Description of Artificial Sequence: Synthetic oligonucleotide"
  source: /note="Description of Combined DNA/RNA Molecule: Synthetic oligonucleotide"
cauugaaagggaguauuactt

SEQ ID NO: 2300 - DNA, 21 bp, Artificial Sequence
  source: /note="Description of Artificial Sequence: Synthetic oligonucleotide"
  source: /note="Description of Combined DNA/RNA Molecule: Synthetic oligonucleotide"
ggaguauuacaaaaacaugtt

SEQ ID NO: 2301 - DNA, 21 bp, Artificial Sequence
  source: /note="Description of Artificial Sequence: Synthetic oligonucleotide"
  source: /note="Description of Combined DNA/RNA Molecule: Synthetic oligonucleotide"
aaaacauggccuuugcuugtt

SEQ ID NO: 2302 - DNA, 21 bp, Artificial Sequence
  source: /note="Description of Artificial Sequence: Synthetic oligonucleotide"
  source: /note="Description of Combined DNA/RNA Molecule: Synthetic oligonucleotide"
gccuuugcuugaaagaaaatt

SEQ ID NO: 2303 - DNA, 21 bp, Artificial Sequence
  source: /note="Description of Artificial Sequence: Synthetic oligonucleotide"
  source: /note="Description of Combined DNA/RNA Molecule: Synthetic oligonucleotide"
gaaagaaaauaccaaggaatt

SEQ ID NO: 2304 - DNA, 21 bp, Artificial Sequence
  source: /note="Description of Artificial Sequence: Synthetic oligonucleotide"
  source: /note="Description of Combined DNA/RNA Molecule: Synthetic oligonucleotide"
ccaaggaacaggaaacugatt

SEQ ID NO: 2305 - DNA, 21 bp, Artificial Sequence
  source: /note="Description of Artificial Sequence: Synthetic oligonucleotide"
  source: /note="Description of Combined DNA/RNA Molecule: Synthetic oligonucleotide"
aacugaucauuaaagccugtt

SEQ ID NO: 2306 - DNA, 21 bp, Artificial Sequence
  source: /note="Description of Artificial Sequence: Synthetic oligonucleotide"
  source: /note="Description of Combined DNA/RNA Molecule: Synthetic oligonucleotide"
uagcaggaaaccacggauatt

SEQ ID NO: 2307 - DNA, 21 bp, Artificial Sequence
  source: /note="Description of Artificial Sequence: Synthetic oligonucleotide"
  source: /note="Description of Combined DNA/RNA Molecule: Synthetic oligonucleotide"
uuggagguagcaggaaacctt

SEQ ID NO: 2308 - DNA, 21 bp, Artificial Sequence
  source: /note="Description of Artificial Sequence: Synthetic oligonucleotide"
  source: /note="Description of Combined DNA/RNA Molecule: Synthetic oligonucleotide"
aaaggcccaugguuggaggtt

SEQ ID NO: 2309 - DNA, 21 bp, Artificial Sequence
  source: /note="Description of Artificial Sequence: Synthetic oligonucleotide"
  source: /note="Description of Combined DNA/RNA Molecule: Synthetic oligonucleotide"
aaguauucccaaaaggccctt

SEQ ID NO: 2310 - DNA, 21 bp, Artificial Sequence
  source: /note="Description of Artificial Sequence: Synthetic oligonucleotide"
  source: /note="Description of Combined DNA/RNA Molecule: Synthetic oligonucleotide"
uuaaaaaacaaaguauucctt

SEQ ID NO: 2311 - DNA, 21 bp, Artificial Sequence
  source: /note="Description of Artificial Sequence: Synthetic oligonucleotide"
  source: /note="Description of Combined DNA/RNA Molecule: Synthetic oligonucleotide"
ggaagauuaaaaaacaaagtt

SEQ ID NO: 2312 - DNA, 21 bp, Artificial Sequence
  source: /note="Description of Artificial Sequence: Synthetic oligonucleotide"
  source: /note="Description of Combined DNA/RNA Molecule: Synthetic oligonucleotide"
ccagguuuuccccaggaagtt

SEQ ID NO: 2313 - DNA, 21 bp, Artificial Sequence
  source: /note="Description of Artificial Sequence: Synthetic oligonucleotide"
  source: /note="Description of Combined DNA/RNA Molecule: Synthetic oligonucleotide"
uccuguccccagguuuucctt

SEQ ID NO: 2314 - DNA, 21 bp, Artificial Sequence
  source: /note="Description of Artificial Sequence: Synthetic oligonucleotide"
  source: /note="Description of Combined DNA/RNA Molecule: Synthetic oligonucleotide"
auauguuugcuccuguccctt

SEQ ID NO: 2315 - DNA, 21 bp, Artificial Sequence
  source: /note="Description of Artificial Sequence: Synthetic oligonucleotide"
  source: /note="Description of Combined DNA/RNA Molecule: Synthetic oligonucleotide"
cugaaaugacauauguuugtt

SEQ ID NO: 2316 - DNA, 21 bp, Artificial Sequence
  source: /note="Description of Artificial Sequence: Synthetic oligonucleotide"
  source: /note="Description of Combined DNA/RNA Molecule: Synthetic oligonucleotide"
uauuuuuggugcugaaaugtt

SEQ ID NO: 2317 - DNA, 21 bp, Artificial Sequence
  source: /note="Description of Artificial Sequence: Synthetic oligonucleotide"
  source: /note="Description of Combined DNA/RNA Molecule: Synthetic oligonucleotide"
cacggaauauuuuuggugctt

SEQ ID NO: 2318 - DNA, 21 bp, Artificial Sequence
  source: /note="Description of Artificial Sequence: Synthetic oligonucleotide"
  source: /note="Description of Combined DNA/RNA Molecule: Synthetic oligonucleotide"
uucagaugcuccaacacggtt

SEQ ID NO: 2319 - DNA, 21 bp, Artificial Sequence
  source: /note="Description of Artificial Sequence: Synthetic oligonucleotide"
  source: /note="Description of Combined DNA/RNA Molecule: Synthetic oligonucleotide"
caauauuuucagaugcucctt

SEQ ID NO: 2320 - DNA, 21 bp, Artificial Sequence
  source: /note="Description of Artificial Sequence: Synthetic oligonucleotide"
  source: /note="Description of Combined DNA/RNA Molecule: Synthetic oligonucleotide"
cuugaaucacaauauuuuctt

SEQ ID NO: 2321 - DNA, 21 bp, Artificial Sequence
  source: /note="Description of Artificial Sequence: Synthetic oligonucleotide"
  source: /note="Description of Combined DNA/RNA Molecule: Synthetic oligonucleotide"
guauccauaaacuugaauctt

SEQ ID NO: 2322 - DNA, 21 bp, Artificial Sequence
  source: /note="Description of Artificial Sequence: Synthetic oligonucleotide"
  source: /note="Description of Combined DNA/RNA Molecule: Synthetic oligonucleotide"
caaaugcuucaguguaucctt

SEQ ID NO: 2323 - DNA, 21 bp, Artificial Sequence
  source: /note="Description of Artificial Sequence: Synthetic oligonucleotide"
  source: /note="Description of Combined DNA/RNA Molecule: Synthetic oligonucleotide"
uuguugcaucaaaugcuuctt

SEQ ID NO: 2324 - DNA, 21 bp, Artificial Sequence
  source: /note="Description of Artificial Sequence: Synthetic oligonucleotide"
  source: /note="Description of Combined DNA/RNA Molecule: Synthetic oligonucleotide"
uuuaauagagauuguugcatt

SEQ ID NO: 2325 - DNA, 21 bp, Artificial Sequence
  source: /note="Description of Artificial Sequence: Synthetic oligonucleotide"
  source: /note="Description of Combined DNA/RNA Molecule: Synthetic oligonucleotide"
auaacuuuuaauagagauutt

SEQ ID NO: 2326 - DNA, 21 bp, Artificial Sequence
  source: /note="Description of Artificial Sequence: Synthetic oligonucleotide"
  source: /note="Description of Combined DNA/RNA Molecule: Synthetic oligonucleotide"
uuuuuuaucaggauaacuutt

SEQ ID NO: 2327 - DNA, 21 bp, Artificial Sequence
  source: /note="Description of Artificial Sequence: Synthetic oligonucleotide"
  source: /note="Description of Combined DNA/RNA Molecule: Synthetic oligonucleotide"
uaacuaaauuuuuuaucagtt

SEQ ID NO: 2328 - DNA, 21 bp, Artificial Sequence
  source: /note="Description of Artificial Sequence: Synthetic oligonucleotide"
  source: /note="Description of Combined DNA/RNA Molecule: Synthetic oligonucleotide"
uggccugaggaguaacuaatt

SEQ ID NO: 2329 - DNA, 21 bp, Artificial Sequence
  source: /note="Description of Artificial Sequence: Synthetic oligonucleotide"
  source: /note="Description of Combined DNA/RNA Molecule: Synthetic oligonucleotide"
aaaugaacauggccugaggtt

SEQ ID NO: 2330 - DNA, 21 bp, Artificial Sequence
  source: /note="Description of Artificial Sequence: Synthetic oligonucleotide"
  source: /note="Description of Combined DNA/RNA Molecule: Synthetic oligonucleotide"
uucucugaggauaaaugaatt

SEQ ID NO: 2331 - DNA, 21 bp, Artificial Sequence
  source: /note="Description of Artificial Sequence: Synthetic oligonucleotide"
  source: /note="Description of Combined DNA/RNA Molecule: Synthetic oligonucleotide"
uuggaauuuauucucugagtt

SEQ ID NO: 2332 - DNA, 21 bp, Artificial Sequence
  source: /note="Description of Artificial Sequence: Synthetic oligonucleotide"
  source: /note="Description of Combined DNA/RNA Molecule: Synthetic oligonucleotide"
cagaguuuuggaauuuauutt

SEQ ID NO: 2333 - DNA, 21 bp, Artificial Sequence
  source: /note="Description of Artificial Sequence: Synthetic oligonucleotide"
  source: /note="Description of Combined DNA/RNA Molecule: Synthetic oligonucleotide"
uauuguuaagauugcagagtt

SEQ ID NO: 2334 - DNA, 21 bp, Artificial Sequence
  source: /note="Description of Artificial Sequence: Synthetic oligonucleotide"
  source: /note="Description of Combined DNA/RNA Molecule: Synthetic oligonucleotide"
uuuugguuguauuguuaagtt

SEQ ID NO: 2335 - DNA, 21 bp, Artificial Sequence
  source: /note="Description of Artificial Sequence: Synthetic oligonucleotide"
  source: /note="Description of Combined DNA/RNA Molecule: Synthetic oligonucleotide"
caggcaauuguuuugguugtt

SEQ ID NO: 2336 - DNA, 21 bp, Artificial Sequence
  source: /note="Description of Artificial Sequence: Synthetic oligonucleotide"
  source: /note="Description of Combined DNA/RNA Molecule: Synthetic oligonucleotide"
uuuguccuccaggcaauugtt

SEQ ID NO: 2337 - DNA, 21 bp, Artificial Sequence
  source: /note="Description of Artificial Sequence: Synthetic oligonucleotide"
  source: /note="Description of Combined DNA/RNA Molecule: Synthetic oligonucleotide"
aagaaacuggguuuugucctt

SEQ ID NO: 2338 - DNA, 21 bp, Artificial Sequence
  source: /note="Description of Artificial Sequence: Synthetic oligonucleotide"
  source: /note="Description of Combined DNA/RNA Molecule: Synthetic oligonucleotide"
aauacacauaagaaacuggtt

SEQ ID NO: 2339 - DNA, 21 bp, Artificial Sequence
  source: /note="Description of Artificial Sequence: Synthetic oligonucleotide"
  source: /note="Description of Combined DNA/RNA Molecule: Synthetic oligonucleotide"
acaacuuccaaauacacautt

SEQ ID NO: 2340 - DNA, 21 bp, Artificial Sequence
  source: /note="Description of Artificial Sequence: Synthetic oligonucleotide"
  source: /note="Description of Combined DNA/RNA Molecule: Synthetic oligonucleotide"
augcuuugauacaacuucctt

SEQ ID NO: 2341 - DNA, 21 bp, Artificial Sequence
  source: /note="Description of Artificial Sequence: Synthetic oligonucleotide"
  source: /note="Description of Combined DNA/RNA Molecule: Synthetic oligonucleotide"
uugaaaaaugcuuugauactt

SEQ ID NO: 2342 - DNA, 21 bp, Artificial Sequence
  source: /note="Description of Artificial Sequence: Synthetic oligonucleotide"
  source: /note="Description of Combined DNA/RNA Molecule: Synthetic oligonucleotide"
uucuuuuugauuuugaaaatt

SEQ ID NO: 2343 - DNA, 21 bp, Artificial Sequence
  source: /note="Description of Artificial Sequence: Synthetic oligonucleotide"
  source: /note="Description of Combined DNA/RNA Molecule: Synthetic oligonucleotide"
guuauuggcauucuuuuugtt

SEQ ID NO: 2344 - DNA, 21 bp, Artificial Sequence
  source: /note="Description of Artificial Sequence: Synthetic oligonucleotide"
  source: /note="Description of Combined DNA/RNA Molecule: Synthetic oligonucleotide"
auugucauagguuauuggctt

SEQ ID NO: 2345 - DNA, 21 bp, Artificial Sequence
  source: /note="Description of Artificial Sequence: Synthetic oligonucleotide"
  source: /note="Description of Combined DNA/RNA Molecule: Synthetic oligonucleotide"
agaaauccauugucauaggtt

SEQ ID NO: 2346 - DNA, 21 bp, Artificial Sequence
  source: /note="Description of Artificial Sequence: Synthetic oligonucleotide"
  source: /note="Description of Combined DNA/RNA Molecule: Synthetic oligonucleotide"
augaaugaagagaaauccatt

SEQ ID NO: 2347 - DNA, 21 bp, Artificial Sequence
  source: /note="Description of Artificial Sequence: Synthetic oligonucleotide"
  source: /note="Description of Combined DNA/RNA Molecule: Synthetic oligonucleotide"
agguuugucuguaugaaugtt

SEQ ID NO: 2348 - DNA, 21 bp, Artificial Sequence
  source: /note="Description of Artificial Sequence: Synthetic oligonucleotide"
  source: /note="Description of Combined DNA/RNA Molecule: Synthetic oligonucleotide"
guauaaacagguuugucugtt

SEQ ID NO: 2349 - DNA, 21 bp, Artificial Sequence
  source: /note="Description of Artificial Sequence: Synthetic oligonucleotide"
  source: /note="Description of Combined DNA/RNA Molecule: Synthetic oligonucleotide"
acuggucuggaguauaaactt

SEQ ID NO: 2350 - DNA, 21 bp, Artificial Sequence
  source: /note="Description of Artificial Sequence: Synthetic oligonucleotide"
  source: /note="Description of Combined DNA/RNA Molecule: Synthetic oligonucleotide"
aacuuuuacugacuggucutt

SEQ ID NO: 2351 - DNA, 21 bp, Artificial Sequence
  source: /note="Description of Artificial Sequence: Synthetic oligonucleotide"
  source: /note="Description of Combined DNA/RNA Molecule: Synthetic oligonucleotide"
auaaacucuaacuuuuacutt

SEQ ID NO: 2352 - DNA, 21 bp, Artificial Sequence
  source: /note="Description of Artificial Sequence: Synthetic oligonucleotide"
  source: /note="Description of Combined DNA/RNA Molecule: Synthetic oligonucleotide"
cauucaacgaauaaacucutt

SEQ ID NO: 2353 - DNA, 21 bp, Artificial Sequence
  source: /note="Description of Artificial Sequence: Synthetic oligonucleotide"
  source: /note="Description of Combined DNA/RNA Molecule: Synthetic oligonucleotide"
uucaagucgucauucaacgtt

SEQ ID NO: 2354 - DNA, 21 bp, Artificial Sequence
  source: /note="Description of Artificial Sequence: Synthetic oligonucleotide"
  source: /note="Description of Combined DNA/RNA Molecule: Synthetic oligonucleotide"
ucuuuuggcuggcuucaagtt

SEQ ID NO: 2355 - DNA, 21 bp, Artificial Sequence
  source: /note="Description of Artificial Sequence: Synthetic oligonucleotide"
  source: /note="Description of Combined DNA/RNA Molecule: Synthetic oligonucleotide"
caguuucucuuuuggcuggtt

SEQ ID NO: 2356 - DNA, 21 bp, Artificial Sequence
  source: /note="Description of Artificial Sequence: Synthetic oligonucleotide"
  source: /note="Description of Combined DNA/RNA Molecule: Synthetic oligonucleotide"
augaaaguuaagacaguuutt

SEQ ID NO: 2357 - DNA, 21 bp, Artificial Sequence
  source: /note="Description of Artificial Sequence: Synthetic oligonucleotide"
  source: /note="Description of Combined DNA/RNA Molecule: Synthetic oligonucleotide"
uucaggaucuaugaaaguutt

SEQ ID NO: 2358 - DNA, 21 bp, Artificial Sequence
  source: /note="Description of Artificial Sequence: Synthetic oligonucleotide"
  source: /note="Description of Combined DNA/RNA Molecule: Synthetic oligonucleotide"
ugauccuucaggaucuaugtt

SEQ ID NO: 2359 - DNA, 21 bp, Artificial Sequence
  source: /note="Description of Artificial Sequence: Synthetic oligonucleotide"
  source: /note="Description of Combined DNA/RNA Molecule: Synthetic oligonucleotide"
ugucaacuucugauccuuctt

SEQ ID NO: 2360 - DNA, 21 bp, Artificial Sequence
  source: /note="Description of Artificial Sequence: Synthetic oligonucleotide"
  source: /note="Description of Combined DNA/RNA Molecule: Synthetic oligonucleotide"
aauuucuucuaccaugucatt

SEQ ID NO: 2361 - DNA, 21 bp, Artificial Sequence
  source: /note="Description of Artificial Sequence: Synthetic oligonucleotide"
  source: /note="Description of Combined DNA/RNA Molecule: Synthetic oligonucleotide"
caauaugaucaauuucuuctt

SEQ ID NO: 2362 - DNA, 21 bp, Artificial Sequence
  source: /note="Description of Artificial Sequence: Synthetic oligonucleotide"
  source: /note="Description of Combined DNA/RNA Molecule: Synthetic oligonucleotide"
agauaauuccaauaugauctt

SEQ ID NO: 2363 - DNA, 21 bp, Artificial Sequence
  source: /note="Description of Artificial Sequence: Synthetic oligonucleotide"
  source: /note="Description of Combined DNA/RNA Molecule: Synthetic oligonucleotide"
caggaaaagagauaauucctt

SEQ ID NO: 2364 - DNA, 21 bp, Artificial Sequence
  source: /note="Description of Artificial Sequence: Synthetic oligonucleotide"
  source: /note="Description of Combined DNA/RNA Molecule: Synthetic oligonucleotide"
cuugaagucaggaaaagagtt

SEQ ID NO: 2365 - DNA, 21 bp, Artificial Sequence
  source: /note="Description of Artificial Sequence: Synthetic oligonucleotide"
  source: /note="Description of Combined DNA/RNA Molecule: Synthetic oligonucleotide"
uuagacggaaucuugaagutt

SEQ ID NO: 2366 - DNA, 21 bp, Artificial Sequence
  source: /note="Description of Artificial Sequence: Synthetic oligonucleotide"
  source: /note="Description of Combined DNA/RNA Molecule: Synthetic oligonucleotide"
cauaucuaggauuagacggtt

SEQ ID NO: 2367 - DNA, 21 bp, Artificial Sequence
  source: /note="Description of Artificial Sequence: Synthetic oligonucleotide"
  source: /note="Description of Combined DNA/RNA Molecule: Synthetic oligonucleotide"
uccacauaccauaucuaggtt

SEQ ID NO: 2368 - DNA, 21 bp, Artificial Sequence
  source: /note="Description of Artificial Sequence: Synthetic oligonucleotide"
  source: /note="Description of Combined DNA/RNA Molecule: Synthetic oligonucleotide"
uuagccuugaucguccacatt

SEQ ID NO: 2369 - DNA, 21 bp, Artificial Sequence
  source: /note="Description of Artificial Sequence: Synthetic oligonucleotide"
  source: /note="Description of Combined DNA/RNA Molecule: Synthetic oligonucleotide"
uuauauuuagccuugaucgtt

SEQ ID NO: 2370 - DNA, 21 bp, Artificial Sequence
  source: /note="Description of Artificial Sequence: Synthetic oligonucleotide"
  source: /note="Description of Combined DNA/RNA Molecule: Synthetic oligonucleotide"
ugaaaaguccucuuuauautt

SEQ ID NO: 2371 - DNA, 21 bp, Artificial Sequence
  source: /note="Description of Artificial Sequence: Synthetic oligonucleotide"
  source: /note="Description of Combined DNA/RNA Molecule: Synthetic oligonucleotide"
caguuguugaaaaguccuctt

SEQ ID NO: 2372 - DNA, 21 bp, Artificial Sequence
  source: /note="Description of Artificial Sequence: Synthetic oligonucleotide"
  source: /note="Description of Combined DNA/RNA Molecule: Synthetic oligonucleotide"
aaauaugcgguuccaguugtt

SEQ ID NO: 2373 - DNA, 21 bp, Artificial Sequence
  source: /note="Description of Artificial Sequence: Synthetic oligonucleotide"
  source: /note="Description of Combined DNA/RNA Molecule: Synthetic oligonucleotide"
uuuaacuucaaaauaugcgtt

SEQ ID NO: 2374 - DNA, 21 bp, Artificial Sequence
  source: /note="Description of Artificial Sequence: Synthetic oligonucleotide"
  source: /note="Description of Combined DNA/RNA Molecule: Synthetic oligonucleotide"
aagacauauucuuuaacuutt

SEQ ID NO: 2375 - DNA, 21 bp, Artificial Sequence
  source: /note="Description of Artificial Sequence: Synthetic oligonucleotide"
  source: /note="Description of Combined DNA/RNA Molecule: Synthetic oligonucleotide"
aauguggcaagacauauuctt

SEQ ID NO: 2376 - DNA, 21 bp, Artificial Sequence
  source: /note="Description of Artificial Sequence: Synthetic oligonucleotide"
  source: /note="Description of Combined DNA/RNA Molecule: Synthetic oligonucleotide"
uugagacagaaaaauguggtt

SEQ ID NO: 2377 - DNA, 21 bp, Artificial Sequence
  source: /note="Description of Artificial Sequence: Synthetic oligonucleotide"
  source: /note="Description of Combined DNA/RNA Molecule: Synthetic oligonucleotide"
ucuggcucgauugagacagtt

SEQ ID NO: 2378 - DNA, 21 bp, Artificial Sequence
  source: /note="Description of Artificial Sequence: Synthetic oligonucleotide"
  source: /note="Description of Combined DNA/RNA Molecule: Synthetic oligonucleotide"
uuauauucuggcucgauugtt

SEQ ID NO: 2379 - DNA, 21 bp, Artificial Sequence
  source: /note="Description of Artificial Sequence: Synthetic oligonucleotide"
  source: /note="Description of Combined DNA/RNA Molecule: Synthetic oligonucleotide"
aaccaaugaaauuauauuctt

SEQ ID NO: 2380 - DNA, 21 bp, Artificial Sequence
  source: /note="Description of Artificial Sequence: Synthetic oligonucleotide"
  source: /note="Description of Combined DNA/RNA Molecule: Synthetic oligonucleotide"
uaaaguucuuguaaccaautt

SEQ ID NO: 2381 - DNA, 21 bp, Artificial Sequence
  source: /note="Description of Artificial Sequence: Synthetic oligonucleotide"
  source: /note="Description of Combined DNA/RNA Molecule: Synthetic oligonucleotide"
ucaaaauucuuaaaguucutt

SEQ ID NO: 2382 - DNA, 21 bp, Artificial Sequence
  source: /note="Description of Artificial Sequence: Synthetic oligonucleotide"
  source: /note="Description of Combined DNA/RNA Molecule: Synthetic oligonucleotide"
uauaguaauuucaaaauuctt

SEQ ID NO: 2383 - DNA, 21 bp, Artificial Sequence
  source: /note="Description of Artificial Sequence: Synthetic oligonucleotide"
  source: /note="Description of Combined DNA/RNA Molecule: Synthetic oligonucleotide"
uugcuuuuauaguaauuuctt

SEQ ID NO: 2384 - DNA, 21 bp, Artificial Sequence
  source: /note="Description of Artificial Sequence: Synthetic oligonucleotide"
  source: /note="Description of Combined DNA/RNA Molecule: Synthetic oligonucleotide"
uauaaaaauaucuugcuuutt

SEQ ID NO: 2385 - DNA, 21 bp, Artificial Sequence
  source: /note="Description of Artificial Sequence: Synthetic oligonucleotide"
  source: /note="Description of Combined DNA/RNA Molecule: Synthetic oligonucleotide"
uacuuuauuauaaaaauautt

SEQ ID NO: 2386 - DNA, 21 bp, Artificial Sequence
  source: /note="Description of Artificial Sequence: Synthetic oligonucleotide"
  source: /note="Description of Combined DNA/RNA Molecule: Synthetic oligonucleotide"
ucagccucagugacuacuutt

SEQ ID NO: 2387 - DNA, 21 bp, Artificial Sequence
  source: /note="Description of Artificial Sequence: Synthetic oligonucleotide"
  source: /note="Description of Combined DNA/RNA Molecule: Synthetic oligonucleotide"
auaaacgucagccucagugtt

SEQ ID NO: 2388 - DNA, 21 bp, Artificial Sequence
  source: /note="Description of Artificial Sequence: Synthetic oligonucleotide"
  source: /note="Description of Combined DNA/RNA Molecule: Synthetic oligonucleotide"
uccaaaugugauauaaacgtt

SEQ ID NO: 2389 - DNA, 21 bp, Artificial Sequence
  source: /note="Description of Artificial Sequence: Synthetic oligonucleotide"
  source: /note="Description of Combined DNA/RNA Molecule: Synthetic oligonucleotide"
uucucuuauuccaaaugugtt

SEQ ID NO: 2390 - DNA, 21 bp, Artificial Sequence
  source: /note="Description of Artificial Sequence: Synthetic oligonucleotide"
  source: /note="Description of Combined DNA/RNA Molecule: Synthetic oligonucleotide"
uuuuaagucuucucuuauutt

SEQ ID NO: 2391 - DNA, 21 bp, Artificial Sequence
  source: /note="Description of Artificial Sequence: Synthetic oligonucleotide"
  source: /note="Description of Combined DNA/RNA Molecule: Synthetic oligonucleotide"
uuuuugaucaucuuuuaagtt

SEQ ID NO: 2392 - DNA, 21 bp, Artificial Sequence
  source: /note="Description of Artificial Sequence: Synthetic oligonucleotide"
  source: /note="Description of Combined DNA/RNA Molecule: Synthetic oligonucleotide"
ucauuucuuuuugaucauctt

SEQ ID NO: 2393 - DNA, 21 bp, Artificial Sequence
  source: /note="Description of Artificial Sequence: Synthetic oligonucleotide"
  source: /note="Description of Combined DNA/RNA Molecule: Synthetic oligonucleotide"
auugcuguuugcaucauuutt

SEQ ID NO: 2394 - DNA, 21 bp, Artificial Sequence
  source: /note="Description of Artificial Sequence: Synthetic oligonucleotide"
  source: /note="Description of Combined DNA/RNA Molecule: Synthetic oligonucleotide"
uuguguuuugcauugcugutt

SEQ ID NO: 2395 - DNA, 21 bp, Artificial Sequence
  source: /note="Description of Artificial Sequence: Synthetic oligonucleotide"
  source: /note="Description of Combined DNA/RNA Molecule: Synthetic oligonucleotide"
uuuaucaacauuguguuuutt

SEQ ID NO: 2396 - DNA, 21 bp, Artificial Sequence
  source: /note="Description of Artificial Sequence: Synthetic oligonucleotide"
  source: /note="Description of Combined DNA/RNA Molecule: Synthetic oligonucleotide"
auuccauuuaucaacauugtt

SEQ ID NO: 2397 - DNA, 21 bp, Artificial Sequence
  source: /note="Description of Artificial Sequence: Synthetic oligonucleotide"
  source: /note="Description of Combined DNA/RNA Molecule: Synthetic oligonucleotide"
augugacuugagcaauucctt

SEQ ID NO: 2398 - DNA, 21 bp, Artificial Sequence
  source: /note="Description of Artificial Sequence: Synthetic oligonucleotide"
  source: /note="Description of Combined DNA/RNA Molecule: Synthetic oligonucleotide"
aaucaaaugugacuugagctt

SEQ ID NO: 2399 - DNA, 21 bp, Artificial Sequence
  source: /note="Description of Artificial Sequence: Synthetic oligonucleotide"
  source: /note="Description of Combined DNA/RNA Molecule: Synthetic oligonucleotide"
ugcuguuucagaaucaaautt

SEQ ID NO: 2400 - DNA, 21 bp, Artificial Sequence
  source: /note="Description of Artificial Sequence: Synthetic oligonucleotide"
  source: /note="Description of Combined DNA/RNA Molecule: Synthetic oligonucleotide"
uucuuugacugcuguuucatt

SEQ ID NO: 2401 - DNA, 21 bp, Artificial Sequence
  source: /note="Description of Artificial Sequence: Synthetic oligonucleotide"
  source: /note="Description of Combined DNA/RNA Molecule: Synthetic oligonucleotide"
guaguaugacaguucuuugtt

SEQ ID NO: 2402 - DNA, 21 bp, Artificial Sequence
  source: /note="Description of Artificial Sequence: Synthetic oligonucleotide"
  source: /note="Description of Combined DNA/RNA Molecule: Synthetic oligonucleotide"
ucuucuaaacuguaguaugtt

SEQ ID NO: 2403 - DNA, 21 bp, Artificial Sequence
  source: /note="Description of Artificial Sequence: Synthetic oligonucleotide"
  source: /note="Description of Combined DNA/RNA Molecule: Synthetic oligonucleotide"
guuuaaaucuucuaaacugtt

SEQ ID NO: 2404 - DNA, 21 bp, Artificial Sequence
  source: /note="Description of Artificial Sequence: Synthetic oligonucleotide"
  source: /note="Description of Combined DNA/RNA Molecule: Synthetic oligonucleotide"
uaaagguacuuguuguuuatt

SEQ ID NO: 2405 - DNA, 21 bp, Artificial Sequence
  source: /note="Description of Artificial Sequence: Synthetic oligonucleotide"
  source: /note="Description of Combined DNA/RNA Molecule: Synthetic oligonucleotide"
agcaauauaaagguacuugtt

SEQ ID NO: 2406 - DNA, 21 bp, Artificial Sequence
  source: /note="Description of Artificial Sequence: Synthetic oligonucleotide"
  source: /note="Description of Combined DNA/RNA Molecule: Synthetic oligonucleotide"
uaugacuguuacagcaauatt

SEQ ID NO: 2407 - DNA, 21 bp, Artificial Sequence
  source: /note="Description of Artificial Sequence: Synthetic oligonucleotide"
  source: /note="Description of Combined DNA/RNA Molecule: Synthetic oligonucleotide"
uguagacucuaugacuguutt

SEQ ID NO: 2408 - DNA, 21 bp, Artificial Sequence
  source: /note="Description of Artificial Sequence: Synthetic oligonucleotide"
  source: /note="Description of Combined DNA/RNA Molecule: Synthetic oligonucleotide"
aaauccaccuguagacucutt

SEQ ID NO: 2409 - DNA, 21 bp, Artificial Sequence
  source: /note="Description of Artificial Sequence: Synthetic oligonucleotide"
  source: /note="Description of Combined DNA/RNA Molecule: Synthetic oligonucleotide"
cugccucuucagaaaaucctt

SEQ ID NO: 2410 - DNA, 21 bp, Artificial Sequence
  source: /note="Description of Artificial Sequence: Synthetic oligonucleotide"
  source: /note="Description of Combined DNA/RNA Molecule: Synthetic oligonucleotide"
cagguauuucugccucuuctt

SEQ ID NO: 2411 - DNA, 21 bp, Artificial Sequence
  source: /note="Description of Artificial Sequence: Synthetic oligonucleotide"
  source: /note="Description of Combined DNA/RNA Molecule: Synthetic oligonucleotide"
uuugaugccagguauuucutt

SEQ ID NO: 2412 - DNA, 21 bp, Artificial Sequence
  source: /note="Description of Artificial Sequence: Synthetic oligonucleotide"
  source: /note="Description of Combined DNA/RNA Molecule: Synthetic oligonucleotide"
gagaggacauauuugaugctt

SEQ ID NO: 2413 - DNA, 21 bp, Artificial Sequence
  source: /note="Description of Artificial Sequence: Synthetic oligonucleotide"
  source: /note="Description of Combined DNA/RNA Molecule: Synthetic oligonucleotide"
uuuguagggagagaggacatt

SEQ ID NO: 2414 - DNA, 21 bp, Artificial Sequence
  source: /note="Description of Artificial Sequence: Synthetic oligonucleotide"
  source: /note="Description of Combined DNA/RNA Molecule: Synthetic oligonucleotide"
aggaguagcaaccaaauuctt

SEQ ID NO: 2415 - DNA, 21 bp, Artificial Sequence
  source: /note="Description of Artificial Sequence: Synthetic oligonucleotide"
  source: /note="Description of Combined DNA/RNA Molecule: Synthetic oligonucleotide"
ucaggaaaagaggaguagctt

SEQ ID NO: 2416 - DNA, 21 bp, Artificial Sequence
  source: /note="Description of Artificial Sequence: Synthetic oligonucleotide"
  source: /note="Description of Combined DNA/RNA Molecule: Synthetic oligonucleotide"
ccaggcuucaggaaaagagtt

SEQ ID NO: 2417 - DNA, 21 bp, Artificial Sequence
  source: /note="Description of Artificial Sequence: Synthetic oligonucleotide"
  source: /note="Description of Combined DNA/RNA Molecule: Synthetic oligonucleotide"
ugggauauggaaucccaggtt

SEQ ID NO: 2418 - DNA, 21 bp, Artificial Sequence
  source: /note="Description of Artificial Sequence: Synthetic oligonucleotide"
  source: /note="Description of Combined DNA/RNA Molecule: Synthetic oligonucleotide"
ugcaccuugaugggauaugtt

SEQ ID NO: 2419 - DNA, 21 bp, Artificial Sequence
  source: /note="Description of Artificial Sequence: Synthetic oligonucleotide"
  source: /note="Description of Combined DNA/RNA Molecule: Synthetic oligonucleotide"
uuaaccugcaccuugauggtt

SEQ ID NO: 2420 - DNA, 21 bp, Artificial Sequence
  source: /note="Description of Artificial Sequence: Synthetic oligonucleotide"
  source: /note="Description of Combined DNA/RNA Molecule: Synthetic oligonucleotide"
caagcgaaucuuuaaccugtt

SEQ ID NO: 2421 - DNA, 21 bp, Artificial Sequence
  source: /note="Description of Artificial Sequence: Synthetic oligonucleotide"
  source: /note="Description of Combined DNA/RNA Molecule: Synthetic oligonucleotide"
uaccaacuggucaagcgaatt

SEQ ID NO: 2422 - DNA, 21 bp, Artificial Sequence
  source: /note="Description of Artificial Sequence: Synthetic oligonucleotide"
  source: /note="Description of Combined DNA/RNA Molecule: Synthetic oligonucleotide"
gacuccuccuaccaacuggtt

SEQ ID NO: 2423 - DNA, 21 bp, Artificial Sequence
  source: /note="Description of Artificial Sequence: Synthetic oligonucleotide"
  source: /note="Description of Combined DNA/RNA Molecule: Synthetic oligonucleotide"
guguuacugggacuccucctt

SEQ ID NO: 2424 - DNA, 21 bp, Artificial Sequence
  source: /note="Description of Artificial Sequence: Synthetic oligonucleotide"
  source: /note="Description of Combined DNA/RNA Molecule: Synthetic oligonucleotide"
ugugcauucaguguuacugtt

SEQ ID NO: 2425 - DNA, 21 bp, Artificial Sequence
  source: /note="Description of Artificial Sequence: Synthetic oligonucleotide"
  source: /note="Description of Combined DNA/RNA Molecule: Synthetic oligonucleotide"
aucaauuguuugugcauuctt

SEQ ID NO: 2426 - DNA, 21 bp, Artificial Sequence
  source: /note="Description of Artificial Sequence: Synthetic oligonucleotide"
  source: /note="Description of Combined DNA/RNA Molecule: Synthetic oligonucleotide"
uugguuuacaucaauuguutt

SEQ ID NO: 2427 - DNA, 21 bp, Artificial Sequence
  source: /note="Description of Artificial Sequence: Synthetic oligonucleotide"
  source: /note="Description of Combined DNA/RNA Molecule: Synthetic oligonucleotide"
ucagaugucucuugguuuatt

SEQ ID NO: 2428 - DNA, 21 bp, Artificial Sequence
  source: /note="Description of Artificial Sequence: Synthetic oligonucleotide"
  source: /note="Description of Combined DNA/RNA Molecule: Synthetic oligonucleotide"
cuuggauccaagucagaugtt

SEQ ID NO: 2429 - DNA, 21 bp, Artificial Sequence
  source: /note="Description of Artificial Sequence: Synthetic oligonucleotide"
  source: /note="Description of Combined DNA/RNA Molecule: Synthetic oligonucleotide"
uuacacuuuugcuuggauctt

SEQ ID NO: 2430 - DNA, 21 bp, Artificial Sequence
  source: /note="Description of Artificial Sequence: Synthetic oligonucleotide"
  source: /note="Description of Combined DNA/RNA Molecule: Synthetic oligonucleotide"
aacacguguuacacuuuugtt

SEQ ID NO: 2431 - DNA, 21 bp, Artificial Sequence
  source: /note="Description of Artificial Sequence: Synthetic oligonucleotide"
  source: /note="Description of Combined DNA/RNA Molecule: Synthetic oligonucleotide"
uccaucaucaacacguguutt

SEQ ID NO: 2432 - DNA, 21 bp, Artificial Sequence
  source: /note="Description of Artificial Sequence: Synthetic oligonucleotide"
  source: /note="Description of Combined DNA/RNA Molecule: Synthetic oligonucleotide"
aaaggaagcuacuccaucatt

SEQ ID NO: 2433 - DNA, 21 bp, Artificial Sequence
  source: /note="Description of Artificial Sequence: Synthetic oligonucleotide"
  source: /note="Description of Combined DNA/RNA Molecule: Synthetic oligonucleotide"
uaagcacaaaggaagcuactt

SEQ ID NO: 2434 - DNA, 21 bp, Artificial Sequence
  source: /note="Description of Artificial Sequence: Synthetic oligonucleotide"
  source: /note="Description of Combined DNA/RNA Molecule: Synthetic oligonucleotide"
uccagaugggagauuaagctt

SEQ ID NO: 2435 - DNA, 21 bp, Artificial Sequence
  source: /note="Description of Artificial Sequence: Synthetic oligonucleotide"
  source: /note="Description of Combined DNA/RNA Molecule: Synthetic oligonucleotide"
gcaccgucacuccagauggtt

SEQ ID NO: 2436 - DNA, 21 bp, Artificial Sequence
  source: /note="Description of Artificial Sequence: Synthetic oligonucleotide"
  source: /note="Description of Combined DNA/RNA Molecule: Synthetic oligonucleotide"
uuaaacuccagcaccgucatt

SEQ ID NO: 2437 - DNA, 21 bp, Artificial Sequence
  source: /note="Description of Artificial Sequence: Synthetic oligonucleotide"
  source: /note="Description of Combined DNA/RNA Molecule: Synthetic oligonucleotide"
uuugacauuaaacuccagctt

SEQ ID NO: 2438 - DNA, 21 bp, Artificial Sequence
  source: /note="Description of Artificial Sequence: Synthetic oligonucleotide"
  source: /note="Description of Combined DNA/RNA Molecule: Synthetic oligonucleotide"
uggagcaucaguuuugacatt

SEQ ID NO: 2439 - DNA, 21 bp, Artificial Sequence
  source: /note="Description of Artificial Sequence: Synthetic oligonucleotide"
  source: /note="Description of Combined DNA/RNA Molecule: Synthetic oligonucleotide"
cuggaagaucuggagcauctt

SEQ ID NO: 2440 - DNA, 21 bp, Artificial Sequence
  source: /note="Description of Artificial Sequence: Synthetic oligonucleotide"
  source: /note="Description of Combined DNA/RNA Molecule: Synthetic oligonucleotide"
uuuucuucuggaagaucugtt

SEQ ID NO: 2441 - DNA, 21 bp, Artificial Sequence
  source: /note="Description of Artificial Sequence: Synthetic oligonucleotide"
  source: /note="Description of Combined DNA/RNA Molecule: Synthetic oligonucleotide"
uucccuggccugauuuucutt

SEQ ID NO: 2442 - DNA, 21 bp, Artificial Sequence
  source: /note="Description of Artificial Sequence: Synthetic oligonucleotide"
  source: /note="Description of Combined DNA/RNA Molecule: Synthetic oligonucleotide"
ucgguaaccuucccuggcctt

SEQ ID NO: 2443 - DNA, 21 bp, Artificial Sequence
  source: /note="Description of Artificial Sequence: Synthetic oligonucleotide"
  source: /note="Description of Combined DNA/RNA Molecule: Synthetic oligonucleotide"
uaugcuauugcucgguaactt

SEQ ID NO: 2444 - DNA, 21 bp, Artificial Sequence
  source: /note="Description of Artificial Sequence: Synthetic oligonucleotide"
  source: /note="Description of Combined DNA/RNA Molecule: Synthetic oligonucleotide"
ugagagaugaguaugcuautt

SEQ ID NO: 2445 - DNA, 21 bp, Artificial Sequence
  source: /note="Description of Artificial Sequence: Synthetic oligonucleotide"
  source: /note="Description of Combined DNA/RNA Molecule: Synthetic oligonucleotide"
uuuggcugagagaugaguatt

SEQ ID NO: 2446 - DNA, 21 bp, Artificial Sequence
  source: /note="Description of Artificial Sequence: Synthetic oligonucleotide"
  source: /note="Description of Combined DNA/RNA Molecule: Synthetic oligonucleotide"
auauaaagguaacuuuggctt

SEQ ID NO: 2447 - DNA, 21 bp, Artificial Sequence
  source: /note="Description of Artificial Sequence: Synthetic oligonucleotide"
  source: /note="Description of Combined DNA/RNA Molecule: Synthetic oligonucleotide"
aguccaaucaauauaaaggtt

SEQ ID NO: 2448 - DNA, 21 bp, Artificial Sequence
  source: /note="Description of Artificial Sequence: Synthetic oligonucleotide"
  source: /note="Description of Combined DNA/RNA Molecule: Synthetic oligonucleotide"
uaugguuaucaguccaauctt

SEQ ID NO: 2449 - DNA, 21 bp, Artificial Sequence
  source: /note="Description of Artificial Sequence: Synthetic oligonucleotide"
  source: /note="Description of Combined DNA/RNA Molecule: Synthetic oligonucleotide"
aaagccuuaugguuaucagtt

SEQ ID NO: 2450 - DNA, 21 bp, Artificial Sequence
  source: /note="Description of Artificial Sequence: Synthetic oligonucleotide"
  source: /note="Description of Combined DNA/RNA Molecule: Synthetic oligonucleotide"
ucucccacuagcaaagccutt

SEQ ID NO: 2451 - DNA, 21 bp, Artificial Sequence
  source: /note="Description of Artificial Sequence: Synthetic oligonucleotide"
  source: /note="Description of Combined DNA/RNA Molecule: Synthetic oligonucleotide"
uauucagauguucucccactt

SEQ ID NO: 2452 - DNA, 21 bp, Artificial Sequence
  source: /note="Description of Artificial Sequence: Synthetic oligonucleotide"
  source: /note="Description of Combined DNA/RNA Molecule: Synthetic oligonucleotide"
uaacaauaauauucagaugtt

SEQ ID NO: 2453 - DNA, 21 bp, Artificial Sequence
  source: /note="Description of Artificial Sequence: Synthetic oligonucleotide"
  source: /note="Description of Combined DNA/RNA Molecule: Synthetic oligonucleotide"
uuuggggguaacaauaauatt

SEQ ID NO: 2454 - DNA, 21 bp, Artificial Sequence
  source: /note="Description of Artificial Sequence: Synthetic oligonucleotide"
  source: /note="Description of Combined DNA/RNA Molecule: Synthetic oligonucleotide"
caauauaugggcuuuugggtt

SEQ ID NO: 2455 - DNA, 21 bp, Artificial Sequence
  source: /note="Description of Artificial Sequence: Synthetic oligonucleotide"
  source: /note="Description of Combined DNA/RNA Molecule: Synthetic oligonucleotide"
ucaauauaugggcuuuuggtt

SEQ ID NO: 2456 - DNA, 21 bp, Artificial Sequence
  source: /note="Description of Artificial Sequence: Synthetic oligonucleotide"
  source: /note="Description of Combined DNA/RNA Molecule: Synthetic oligonucleotide"
gucaauauaugggcuuuugtt

SEQ ID NO: 2457 - DNA, 21 bp, Artificial Sequence
  source: /note="Description of Artificial Sequence: Synthetic oligonucleotide"
  source: /note="Description of Combined DNA/RNA Molecule: Synthetic oligonucleotide"
ugucaauauaugggcuuuutt

SEQ ID NO: 2458 - DNA, 21 bp, Artificial Sequence
  source: /note="Description of Artificial Sequence: Synthetic oligonucleotide"
  source: /note="Description of Combined DNA/RNA Molecule: Synthetic oligonucleotide"
uugucaauauaugggcuuutt

SEQ ID NO: 2459 - DNA, 21 bp, Artificial Sequence
  source: /note="Description of Artificial Sequence: Synthetic oligonucleotide"
  source: /note="Description of Combined DNA/RNA Molecule: Synthetic oligonucleotide"
uuugucaauauaugggcuutt

SEQ ID NO: 2460 - DNA, 21 bp, Artificial Sequence
  source: /note="Description of Artificial Sequence: Synthetic oligonucleotide"
  source: /note="Description of Combined DNA/RNA Molecule: Synthetic oligonucleotide"
uuuugucaauauaugggcutt

SEQ ID NO: 2461 - DNA, 21 bp, Artificial Sequence
  source: /note="Description of Artificial Sequence: Synthetic oligonucleotide"
  source: /note="Description of Combined DNA/RNA Molecule: Synthetic oligonucleotide"
auuuugucaauauaugggctt

SEQ ID NO: 2462 - DNA, 21 bp, Artificial Sequence
  source: /note="Description of Artificial Sequence: Synthetic oligonucleotide"
  source: /note="Description of Combined DNA/RNA Molecule: Synthetic oligonucleotide"
uauuuugucaauauaugggtt

SEQ ID NO: 2463 - DNA, 21 bp, Artificial Sequence
  source: /note="Description of Artificial Sequence: Synthetic oligonucleotide"
  source: /note="Description of Combined DNA/RNA Molecule: Synthetic oligonucleotide"
uuauuuugucaauauauggtt

SEQ ID NO: 2464 - DNA, 21 bp, Artificial Sequence
  source: /note="Description of Artificial Sequence: Synthetic oligonucleotide"
  source: /note="Description of Combined DNA/RNA Molecule: Synthetic oligonucleotide"
guuauuuugucaauauaugtt

SEQ ID NO: 2465 - DNA, 21 bp, Artificial Sequence
  source: /note="Description of Artificial Sequence: Synthetic oligonucleotide"
  source: /note="Description of Combined DNA/RNA Molecule: Synthetic oligonucleotide"
aguuauuuugucaauauautt

SEQ ID NO: 2466 - DNA, 21 bp, Artificial Sequence
  source: /note="Description of Artificial Sequence: Synthetic oligonucleotide"
  source: /note="Description of Combined DNA/RNA Molecule: Synthetic oligonucleotide"
gaguuauuuugucaauauatt

SEQ ID NO: 2467 - DNA, 21 bp, Artificial Sequence
  source: /note="Description of Artificial Sequence: Synthetic oligonucleotide"
  source: /note="Description of Combined DNA/RNA Molecule: Synthetic oligonucleotide"
ugaguuauuuugucaauautt

SEQ ID NO: 2468 - DNA, 21 bp, Artificial Sequence
  source: /note="Description of Artificial Sequence: Synthetic oligonucleotide"
  source: /note="Description of Combined DNA/RNA Molecule: Synthetic oligonucleotide"
gugaguuauuuugucaauatt

SEQ ID NO: 2469 - DNA, 21 bp, Artificial Sequence
  source: /note="Description of Artificial Sequence: Synthetic oligonucleotide"
  source: /note="Description of Combined DNA/RNA Molecule: Synthetic oligonucleotide"
agugaguuauuuugucaautt

SEQ ID NO: 2470 - DNA, 21 bp, Artificial Sequence
  source: /note="Description of Artificial Sequence: Synthetic oligonucleotide"
  source: /note="Description of Combined DNA/RNA Molecule: Synthetic oligonucleotide"
uagugaguuauuuugucaatt

SEQ ID NO: 2471 - DNA, 21 bp, Artificial Sequence
  source: /note="Description of Artificial Sequence: Synthetic oligonucleotide"
  source: /note="Description of Combined DNA/RNA Molecule: Synthetic oligonucleotide"
auagugaguuauuuugucatt

SEQ ID NO: 2472 - DNA, 21 bp, Artificial Sequence
  source: /note="Description of Artificial Sequence: Synthetic oligonucleotide"
  source: /note="Description of Combined DNA/RNA Molecule: Synthetic oligonucleotide"
uauagugaguuauuuuguctt

SEQ ID NO: 2473 - DNA, 21 bp, Artificial Sequence
  source: /note="Description of Artificial Sequence: Synthetic oligonucleotide"
  source: /note="Description of Combined DNA/RNA Molecule: Synthetic oligonucleotide"
aauuauagugaguuauuuutt

SEQ ID NO: 2474 - DNA, 21 bp, Artificial Sequence
  source: /note="Description of Artificial Sequence: Synthetic oligonucleotide"
  source: /note="Description of Combined DNA/RNA Molecule: Synthetic oligonucleotide"
uaauuauagugaguuauuutt

SEQ ID NO: 2475 - DNA, 21 bp, Artificial Sequence
  source: /note="Description of Artificial Sequence: Synthetic oligonucleotide"
  source: /note="Description of Combined DNA/RNA Molecule: Synthetic oligonucleotide"
guaauuauagugaguuauutt

SEQ ID NO: 2476 - DNA, 21 bp, Artificial Sequence
  source: /note="Description of Artificial Sequence: Synthetic oligonucleotide"
  source: /note="Description of Combined DNA/RNA Molecule: Synthetic oligonucleotide"
aguaauuauagugaguuautt

SEQ ID NO: 2477 - DNA, 21 bp, Artificial Sequence
  source: /note="Description of Artificial Sequence: Synthetic oligonucleotide"
  source: /note="Description of Combined DNA/RNA Molecule: Synthetic oligonucleotide"
caaguaauuauagugaguutt

SEQ ID NO: 2478 - DNA, 21 bp, Artificial Sequence
  source: /note="Description of Artificial Sequence: Synthetic oligonucleotide"
  source: /note="Description of Combined DNA/RNA Molecule: Synthetic oligonucleotide"
ucaaguaauuauagugagutt

SEQ ID NO: 2479 - DNA, 21 bp, Artificial Sequence
  source: /note="Description of Artificial Sequence: Synthetic oligonucleotide"
  source: /note="Description of Combined DNA/RNA Molecule: Synthetic oligonucleotide"
aucaaguaauuauagugagtt

SEQ ID NO: 2480 - DNA, 21 bp, Artificial Sequence
  source: /note="Description of Artificial Sequence: Synthetic oligonucleotide"
  source: /note="Description of Combined DNA/RNA Molecule: Synthetic oligonucleotide"
aaucaaguaauuauagugatt

SEQ ID NO: 2481 - DNA, 21 bp, Artificial Sequence
  source: /note="Description of Artificial Sequence: Synthetic oligonucleotide"
  source: /note="Description of Combined DNA/RNA Molecule: Synthetic oligonucleotide"
aaaaucaaguaauuauagutt

SEQ ID NO: 2482 - DNA, 21 bp, Artificial Sequence
  source: /note="Description of Artificial Sequence: Synthetic oligonucleotide"
  source: /note="Description of Combined DNA/RNA Molecule: Synthetic oligonucleotide"
uaaaaucaaguaauuauagtt

SEQ ID NO: 2483 - DNA, 21 bp, Artificial Sequence
  source: /note="Description of Artificial Sequence: Synthetic oligonucleotide"
  source: /note="Description of Combined DNA/RNA Molecule: Synthetic oligonucleotide"
auaaaaucaaguaauuauatt

SEQ ID NO: 2484 - DNA, 21 bp, Artificial Sequence
  source: /note="Description of Artificial Sequence: Synthetic oligonucleotide"
  source: /note="Description of Combined DNA/RNA Molecule: Synthetic oligonucleotide"
gauaaaaucaaguaauuautt

SEQ ID NO: 2485 - DNA, 21 bp, Artificial Sequence
  source: /note="Description of Artificial Sequence: Synthetic oligonucleotide"
  source: /note="Description of Combined DNA/RNA Molecule: Synthetic oligonucleotide"
ggauaaaaucaaguaauuatt

SEQ ID NO: 2486 - DNA, 21 bp, Artificial Sequence
  source: /note="Description of Artificial Sequence: Synthetic oligonucleotide"
  source: /note="Description of Combined DNA/RNA Molecule: Synthetic oligonucleotide"
uggauaaaaucaaguaauutt

SEQ ID NO: 2487 - DNA, 21 bp, Artificial Sequence
  source: /note="Description of Artificial Sequence: Synthetic oligonucleotide"
  source: /note="Description of Combined DNA/RNA Molecule: Synthetic oligonucleotide"
uuggauaaaaucaaguaautt

SEQ ID NO: 2488 - DNA, 21 bp, Artificial Sequence
  source: /note="Description of Artificial Sequence: Synthetic oligonucleotide"
  source: /note="Description of Combined DNA/RNA Molecule: Synthetic oligonucleotide"
uaauuuugcccuuggauaatt

SEQ ID NO: 2489 - DNA, 21 bp, Artificial Sequence
  source: /note="Description of Artificial Sequence: Synthetic oligonucleotide"
  source: /note="Description of Combined DNA/RNA Molecule: Synthetic oligonucleotide"
ccaaaguggauaauuuugctt

SEQ ID NO: 2490 - DNA, 21 bp, Artificial Sequence
  source: /note="Description of Artificial Sequence: Synthetic oligonucleotide"
  source: /note="Description of Combined DNA/RNA Molecule: Synthetic oligonucleotide"
ucucccucgugccaaagugtt

SEQ ID NO: 2491 - DNA, 21 bp, Artificial Sequence
  source: /note="Description of Artificial Sequence: Synthetic oligonucleotide"
  source: /note="Description of Combined DNA/RNA Molecule: Synthetic oligonucleotide"
ucugaaaauuucucccucgtt

SEQ ID NO: 2492 - DNA, 21 bp, Artificial Sequence
  source: /note="Description of Artificial Sequence: Synthetic oligonucleotide"
  source: /note="Description of Combined DNA/RNA Molecule: Synthetic oligonucleotide"
auaagaugcaucugaaaautt

SEQ ID NO: 2493 - DNA, 21 bp, Artificial Sequence
  source: /note="Description of Artificial Sequence: Synthetic oligonucleotide"
  source: /note="Description of Combined DNA/RNA Molecule: Synthetic oligonucleotide"
uuauacuuugauaagaugctt

SEQ ID NO: 2494 - DNA, 21 bp, Artificial Sequence
  source: /note="Description of Artificial Sequence: Synthetic oligonucleotide"
  source: /note="Description of Combined DNA/RNA Molecule: Synthetic oligonucleotide"
cuggaauguuuauacuuugtt

SEQ ID NO: 2495 - DNA, 21 bp, Artificial Sequence
  source: /note="Description of Artificial Sequence: Synthetic oligonucleotide"
  source: /note="Description of Combined DNA/RNA Molecule: Synthetic oligonucleotide"
uguucuguguuacuggaautt

SEQ ID NO: 2496 - DNA, 21 bp, Artificial Sequence
  source: /note="Description of Artificial Sequence: Synthetic oligonucleotide"
  source: /note="Description of Combined DNA/RNA Molecule: Synthetic oligonucleotide"
gaaggaaccauguucugugtt

SEQ ID NO: 2497 - DNA, 21 bp, Artificial Sequence
  source: /note="Description of Artificial Sequence: Synthetic oligonucleotide"
  source: /note="Description of Combined DNA/RNA Molecule: Synthetic oligonucleotide"
aagucgggaugaaggaacctt

SEQ ID NO: 2498 - DNA, 21 bp, Artificial Sequence
  source: /note="Description of Artificial Sequence: Synthetic oligonucleotide"
  source: /note="Description of Combined DNA/RNA Molecule: Synthetic oligonucleotide"
uaauagaccagaagucgggtt

SEQ ID NO: 2499 - DNA, 21 bp, Artificial Sequence
  source: /note="Description of Artificial Sequence: Synthetic oligonucleotide"
  source: /note="Description of Combined DNA/RNA Molecule: Synthetic oligonucleotide"
ugugacgauguaauagacctt

SEQ ID NO: 2500 - DNA, 21 bp, Artificial Sequence
  source: /note="Description of Artificial Sequence: Synthetic oligonucleotide"
  source: /note="Description of Combined DNA/RNA Molecule: Synthetic oligonucleotide"
ucuguucuccugugacgautt

SEQ ID NO: 2501 - DNA, 21 bp, Artificial Sequence
  source: /note="Description of Artificial Sequence: Synthetic oligonucleotide"
  source: /note="Description of Combined DNA/RNA Molecule: Synthetic oligonucleotide"
ucugcugucuguucuccugtt

SEQ ID NO: 2502 - DNA, 21 bp, Artificial Sequence
  source: /note="Description of Artificial Sequence: Synthetic oligonucleotide"
  source: /note="Description of Combined DNA/RNA Molecule: Synthetic oligonucleotide"
ucagacacuaauucugcugtt

SEQ ID NO: 2503 - DNA, 21 bp, Artificial Sequence
  source: /note="Description of Artificial Sequence: Synthetic oligonucleotide"
  source: /note="Description of Combined DNA/RNA Molecule: Synthetic oligonucleotide"
accagacugaaucagacactt

SEQ ID NO: 2504 - DNA, 21 bp, Artificial Sequence
  source: /note="Description of Artificial Sequence: Synthetic oligonucleotide"
  source: /note="Description of Combined DNA/RNA Molecule: Synthetic oligonucleotide"
ucaauauuuaaccagacugtt

SEQ ID NO: 2505 - DNA, 21 bp, Artificial Sequence
  source: /note="Description of Artificial Sequence: Synthetic oligonucleotide"
  source: /note="Description of Combined DNA/RNA Molecule: Synthetic oligonucleotide"
uuuuucuucaauauuuaactt

SEQ ID NO: 2506 - DNA, 21 bp, Artificial Sequence
  source: /note="Description of Artificial Sequence: Synthetic oligonucleotide"
  source: /note="Description of Combined DNA/RNA Molecule: Synthetic oligonucleotide"
cugguugccacauuuuucutt

SEQ ID NO: 2507 - DNA, 21 bp, Artificial Sequence
  source: /note="Description of Artificial Sequence: Synthetic oligonucleotide"
  source: /note="Description of Combined DNA/RNA Molecule: Synthetic oligonucleotide"
ugaaccuggagcugguugctt

SEQ ID NO: 2508 - DNA, 21 bp, Artificial Sequence
  source: /note="Description of Artificial Sequence: Synthetic oligonucleotide"
  source: /note="Description of Combined DNA/RNA Molecule: Synthetic oligonucleotide"
agacagaugaaccuggagctt

SEQ ID NO: 2509 - DNA, 21 bp, Artificial Sequence
  source: /note="Description of Artificial Sequence: Synthetic oligonucleotide"
  source: /note="Description of Combined DNA/RNA Molecule: Synthetic oligonucleotide"
ucugcaucaggagacagautt

SEQ ID NO: 2510 - DNA, 21 bp, Artificial Sequence
  source: /note="Description of Artificial Sequence: Synthetic oligonucleotide"
  source: /note="Description of Combined DNA/RNA Molecule: Synthetic oligonucleotide"
gagaauaugcaucugcauctt

SEQ ID NO: 2511 - DNA, 21 bp, Artificial Sequence
  source: /note="Description of Artificial Sequence: Synthetic oligonucleotide"
  source: /note="Description of Combined DNA/RNA Molecule: Synthetic oligonucleotide"
uuuggccuggagaauaugctt

SEQ ID NO: 2512 - DNA, 21 bp, Artificial Sequence
  source: /note="Description of Artificial Sequence: Synthetic oligonucleotide"
  source: /note="Description of Combined DNA/RNA Molecule: Synthetic oligonucleotide"
aagagacacaguuuggccutt

SEQ ID NO: 2513 - DNA, 21 bp, Artificial Sequence
  source: /note="Description of Artificial Sequence: Synthetic oligonucleotide"
  source: /note="Description of Combined DNA/RNA Molecule: Synthetic oligonucleotide"
uugccauauuaagagacactt

SEQ ID NO: 2514 - DNA, 21 bp, Artificial Sequence
  source: /note="Description of Artificial Sequence: Synthetic oligonucleotide"
  source: /note="Description of Combined DNA/RNA Molecule: Synthetic oligonucleotide"
auuccaguugccauauuaatt

SEQ ID NO: 2515 - DNA, 21 bp, Artificial Sequence
  source: /note="Description of Artificial Sequence: Synthetic oligonucleotide"
  source: /note="Description of Combined DNA/RNA Molecule: Synthetic oligonucleotide"
ccaggaauccauuccaguutt

SEQ ID NO: 2516 - DNA, 21 bp, Artificial Sequence
  source: /note="Description of Artificial Sequence: Synthetic oligonucleotide"
  source: /note="Description of Combined DNA/RNA Molecule: Synthetic oligonucleotide"
ugcuaaugccacccaggaatt

SEQ ID NO: 2517 - DNA, 21 bp, Artificial Sequence
  source: /note="Description of Artificial Sequence: Synthetic oligonucleotide"
  source: /note="Description of Combined DNA/RNA Molecule: Synthetic oligonucleotide"
guccacugcugcuaaugcctt

SEQ ID NO: 2518 - DNA, 21 bp, Artificial Sequence
  source: /note="Description of Artificial Sequence: Synthetic oligonucleotide"
  source: /note="Description of Combined DNA/RNA Molecule: Synthetic oligonucleotide"
auacacagcacuguccacutt

SEQ ID NO: 2519 - DNA, 21 bp, Artificial Sequence
  source: /note="Description of Artificial Sequence: Synthetic oligonucleotide"
  source: /note="Description of Combined DNA/RNA Molecule: Synthetic oligonucleotide"
uuuggacuccauacacagctt

SEQ ID NO: 2520 - DNA, 21 bp, Artificial Sequence
  source: /note="Description of Artificial Sequence: Synthetic oligonucleotide"
  source: /note="Description of Combined DNA/RNA Molecule: Synthetic oligonucleotide"
uuuggcuccucuuuggacutt

SEQ ID NO: 2521 - DNA, 21 bp, Artificial Sequence
  source: /note="Description of Artificial Sequence: Synthetic oligonucleotide"
  source: /note="Description of Combined DNA/RNA Molecule: Synthetic oligonucleotide"
agggcuuuuuggcuccucutt

SEQ ID NO: 2522 - DNA, 21 bp, Artificial Sequence
  source: /note="Description of Artificial Sequence: Synthetic oligonucleotide"
  source: /note="Description of Combined DNA/RNA Molecule: Synthetic oligonucleotide"
aauacucuuuccaagggcutt

SEQ ID NO: 2523 - DNA, 21 bp, Artificial Sequence
  source: /note="Description of Artificial Sequence: Synthetic oligonucleotide"
  source: /note="Description of Combined DNA/RNA Molecule: Synthetic oligonucleotide"
uaagaauugaaauacucuutt

SEQ ID NO: 2524 - DNA, 21 bp, Artificial Sequence
  source: /note="Description of Artificial Sequence: Synthetic oligonucleotide"
  source: /note="Description of Combined DNA/RNA Molecule: Synthetic oligonucleotide"
ucuucucuaagaauugaaatt

SEQ ID NO: 2525 - DNA, 21 bp, Artificial Sequence
  source: /note="Description of Artificial Sequence: Synthetic oligonucleotide"
  source: /note="Description of Combined DNA/RNA Molecule: Synthetic oligonucleotide"
agcccagaucacucuucuctt

SEQ ID NO: 2526 - DNA, 21 bp, Artificial Sequence
  source: /note="Description of Artificial Sequence: Synthetic oligonucleotide"
  source: /note="Description of Combined DNA/RNA Molecule: Synthetic oligonucleotide"
ugccccacagcccagaucatt

SEQ ID NO: 2527 - DNA, 21 bp, Artificial Sequence
  source: /note="Description of Artificial Sequence: Synthetic oligonucleotide"
  source: /note="Description of Combined DNA/RNA Molecule: Synthetic oligonucleotide"
ugaggccaccaccugcccctt

SEQ ID NO: 2528 - DNA, 21 bp, Artificial Sequence
  source: /note="Description of Artificial Sequence: Synthetic oligonucleotide"
  source: /note="Description of Combined DNA/RNA Molecule: Synthetic oligonucleotide"
uuggcauuguugaggccactt

SEQ ID NO: 2529 - DNA, 21 bp, Artificial Sequence
  source: /note="Description of Artificial Sequence: Synthetic oligonucleotide"
  source: /note="Description of Combined DNA/RNA Molecule: Synthetic oligonucleotide"
gaacacauuggcauuguugtt

SEQ ID NO: 2530 - DNA, 21 bp, Artificial Sequence
  source: /note="Description of Artificial Sequence: Synthetic oligonucleotide"
  source: /note="Description of Combined DNA/RNA Molecule: Synthetic oligonucleotide"
agcuagguggaacacauugtt

SEQ ID NO: 2531 - DNA, 21 bp, Artificial Sequence
  source: /note="Description of Artificial Sequence: Synthetic oligonucleotide"
  source: /note="Description of Combined DNA/RNA Molecule: Synthetic oligonucleotide"
agguaaguccagcuaggugtt

SEQ ID NO: 2532 - DNA, 21 bp, Artificial Sequence
  source: /note="Description of Artificial Sequence: Synthetic oligonucleotide"
  source: /note="Description of Combined DNA/RNA Molecule: Synthetic oligonucleotide"
uuagugaggaagguaaguctt

SEQ ID NO: 2533 - DNA, 21 bp, Artificial Sequence
  source: /note="Description of Artificial Sequence: Synthetic oligonucleotide"
  source: /note="Description of Combined DNA/RNA Molecule: Synthetic oligonucleotide"
ucugcauuugcauuagugatt

SEQ ID NO: 2534 - DNA, 21 bp, Artificial Sequence
  source: /note="Description of Artificial Sequence: Synthetic oligonucleotide"
  source: /note="Description of Combined DNA/RNA Molecule: Synthetic oligonucleotide"
uugggagucaucugcauuutt

SEQ ID NO: 2535 - DNA, 21 bp, Artificial Sequence
  source: /note="Description of Artificial Sequence: Synthetic oligonucleotide"
  source: /note="Description of Combined DNA/RNA Molecule: Synthetic oligonucleotide"
uucaucauuuucuugggagtt

SEQ ID NO: 2536 - DNA, 21 bp, Artificial Sequence
  source: /note="Description of Artificial Sequence: Synthetic oligonucleotide"
  source: /note="Description of Combined DNA/RNA Molecule: Synthetic oligonucleotide"
ugagaauuucuuuacaaggtt

SEQ ID NO: 2537 - DNA, 21 bp, Artificial Sequence
  source: /note="Description of Artificial Sequence: Synthetic oligonucleotide"
  source: /note="Description of Combined DNA/RNA Molecule: Synthetic oligonucleotide"
ucuucuuggccugagaauutt

SEQ ID NO: 2538 - DNA, 21 bp, Artificial Sequence
  source: /note="Description of Artificial Sequence: Synthetic oligonucleotide"
  source: /note="Description of Combined DNA/RNA Molecule: Synthetic oligonucleotide"
uuugcagcguucuucuuggtt

SEQ ID NO: 2539 - DNA, 21 bp, Artificial Sequence
  source: /note="Description of Artificial Sequence: Synthetic oligonucleotide"
  source: /note="Description of Combined DNA/RNA Molecule: Synthetic oligonucleotide"
ucuaucuucuuuugcagcgtt

SEQ ID NO: 2540 - DNA, 21 bp, Artificial Sequence
  source: /note="Description of Artificial Sequence: Synthetic oligonucleotide"
  source: /note="Description of Combined DNA/RNA Molecule: Synthetic oligonucleotide"
uauuucuucuaucuucuuutt

SEQ ID NO: 2541 - DNA, 21 bp, Artificial Sequence
  source: /note="Description of Artificial Sequence: Synthetic oligonucleotide"
  source: /note="Description of Combined DNA/RNA Molecule: Synthetic oligonucleotide"
auauuuagcagcuauuucutt

SEQ ID NO: 2542 - DNA, 21 bp, Artificial Sequence
  source: /note="Description of Artificial Sequence: Synthetic oligonucleotide"
  source: /note="Description of Combined DNA/RNA Molecule: Synthetic oligonucleotide"
aauguuuauauuuagcagctt

SEQ ID NO: 2543 - DNA, 21 bp, Artificial Sequence
  source: /note="Description of Artificial Sequence: Synthetic oligonucleotide"
  source: /note="Description of Combined DNA/RNA Molecule: Synthetic oligonucleotide"
uuucuucacuacugaaugutt

SEQ ID NO: 2544 - DNA, 21 bp, Artificial Sequence
  source: /note="Description of Artificial Sequence: Synthetic oligonucleotide"
  source: /note="Description of Combined DNA/RNA Molecule: Synthetic oligonucleotide"
aacaacauuucuucacuactt

SEQ ID NO: 2545 - DNA, 21 bp, Artificial Sequence
  source: /note="Description of Artificial Sequence: Synthetic oligonucleotide"
  source: /note="Description of Combined DNA/RNA Molecule: Synthetic oligonucleotide"
cuccaucguaacaacauuutt

SEQ ID NO: 2546 - DNA, 21 bp, Artificial Sequence
  source: /note="Description of Artificial Sequence: Synthetic oligonucleotide"
  source: /note="Description of Combined DNA/RNA Molecule: Synthetic oligonucleotide"
auuaacgcaggcuccaucgtt

SEQ ID NO: 2547 - DNA, 21 bp, Artificial Sequence
  source: /note="Description of Artificial Sequence: Synthetic oligonucleotide"
  source: /note="Description of Combined DNA/RNA Molecule: Synthetic oligonucleotide"
gguuucaucauuauuaacgtt

SEQ ID NO: 2548 - DNA, 21 bp, Artificial Sequence
  source: /note="Description of Artificial Sequence: Synthetic oligonucleotide"
  source: /note="Description of Combined DNA/RNA Molecule: Synthetic oligonucleotide"
ugcucacagguuucaucautt

SEQ ID NO: 2549 - DNA, 21 bp, Artificial Sequence
  source: /note="Description of Artificial Sequence: Synthetic oligonucleotide"
  source: /note="Description of Combined DNA/RNA Molecule: Synthetic oligonucleotide"
ugcagcucgcugcucacagtt

SEQ ID NO: 2550 - DNA, 21 bp, Artificial Sequence
  source: /note="Description of Artificial Sequence: Synthetic oligonucleotide"
  source: /note="Description of Combined DNA/RNA Molecule: Synthetic oligonucleotide"
aacuaauccgugcagcucgtt

SEQ ID NO: 2551 - DNA, 21 bp, Artificial Sequence
  source: /note="Description of Artificial Sequence: Synthetic oligonucleotide"
  source: /note="Description of Combined DNA/RNA Molecule: Synthetic oligonucleotide"
cuuggcccuaaacuaaucctt

SEQ ID NO: 2552 - DNA, 21 bp, Artificial Sequence
  source: /note="Description of Artificial Sequence: Synthetic oligonucleotide"
  source: /note="Description of Combined DNA/RNA Molecule: Synthetic oligonucleotide"
cuuugaugcaucuuggccctt

SEQ ID NO: 2553 - DNA, 21 bp, Artificial Sequence
  source: /note="Description of Artificial Sequence: Synthetic oligonucleotide"
  source: /note="Description of Combined DNA/RNA Molecule: Synthetic oligonucleotide"
uucagugaaagcuuugaugtt

SEQ ID NO: 2554 - DNA, 21 bp, Artificial Sequence
  source: /note="Description of Artificial Sequence: Synthetic oligonucleotide"
  source: /note="Description of Combined DNA/RNA Molecule: Synthetic oligonucleotide"
cacaacauucagugaaagctt

SEQ ID NO: 2555 - DNA, 21 bp, Artificial Sequence
  source: /note="Description of Artificial Sequence: Synthetic oligonucleotide"
  source: /note="Description of Combined DNA/RNA Molecule: Synthetic oligonucleotide"
cuugcgacgacacaacauutt

SEQ ID NO: 2556 - DNA, 21 bp, Artificial Sequence
  source: /note="Description of Artificial Sequence: Synthetic oligonucleotide"
  source: /note="Description of Combined DNA/RNA Molecule: Synthetic oligonucleotide"
acggagcuggcuugcgacgtt

SEQ ID NO: 2557 - DNA, 21 bp, Artificial Sequence
  source: /note="Description of Artificial Sequence: Synthetic oligonucleotide"
  source: /note="Description of Combined DNA/RNA Molecule: Synthetic oligonucleotide"
agagauauuagcacggagctt

SEQ ID NO: 2558 - DNA, 21 bp, Artificial Sequence
  source: /note="Description of Artificial Sequence: Synthetic oligonucleotide"
  source: /note="Description of Combined DNA/RNA Molecule: Synthetic oligonucleotide"
ucuuuaugagagauauuagtt

SEQ ID NO: 2559 - DNA, 21 bp, Artificial Sequence
  source: /note="Description of Artificial Sequence: Synthetic oligonucleotide"
  source: /note="Description of Combined DNA/RNA Molecule: Synthetic oligonucleotide"
uucccaauugcaugucuuutt

SEQ ID NO: 2560 - DNA, 21 bp, Artificial Sequence
  source: /note="Description of Artificial Sequence: Synthetic oligonucleotide"
  source: /note="Description of Combined DNA/RNA Molecule: Synthetic oligonucleotide"
uguguagccuucccaauugtt

SEQ ID NO: 2561 - DNA, 21 bp, Artificial Sequence
  source: /note="Description of Artificial Sequence: Synthetic oligonucleotide"
  source: /note="Description of Combined DNA/RNA Molecule: Synthetic oligonucleotide"
cagggucuucauguguagctt

SEQ ID NO: 2562 - DNA, 21 bp, Artificial Sequence
  source: /note="Description of Artificial Sequence: Synthetic oligonucleotide"
  source: /note="Description of Combined DNA/RNA Molecule: Synthetic oligonucleotide"
ugguaacagggucuucaugtt

SEQ ID NO: 2563 - DNA, 21 bp, Artificial Sequence
  source: /note="Description of Artificial Sequence: Synthetic oligonucleotide"
  source: /note="Description of Combined DNA/RNA Molecule: Synthetic oligonucleotide"
ucuggcuugcuuacugguatt

SEQ ID NO: 2564 - DNA, 21 bp, Artificial Sequence
  source: /note="Description of Artificial Sequence: Synthetic oligonucleotide"
  source: /note="Description of Combined DNA/RNA Molecule: Synthetic oligonucleotide"
uccgaauuucuggcuugcutt

SEQ ID NO: 2565 - DNA, 21 bp, Artificial Sequence
  source: /note="Description of Artificial Sequence: Synthetic oligonucleotide"
  source: /note="Description of Combined DNA/RNA Molecule: Synthetic oligonucleotide"
aaaauaacuccgaauuucutt

SEQ ID NO: 2566 - DNA, 21 bp, Artificial Sequence
  source: /note="Description of Artificial Sequence: Synthetic oligonucleotide"
  source: /note="Description of Combined DNA/RNA Molecule: Synthetic oligonucleotide"
agcuuucuggaaaauaacutt

SEQ ID NO: 2567 - DNA, 21 bp, Artificial Sequence
  source: /note="Description of Artificial Sequence: Synthetic oligonucleotide"
  source: /note="Description of Combined DNA/RNA Molecule: Synthetic oligonucleotide"
ucccacaaccagcuuucugtt

SEQ ID NO: 2568 - DNA, 21 bp, Artificial Sequence
  source: /note="Description of Artificial Sequence: Synthetic oligonucleotide"
  source: /note="Description of Combined DNA/RNA Molecule: Synthetic oligonucleotide"
aacaagaugaacuucccactt

SEQ ID NO: 2569 - DNA, 21 bp, Artificial Sequence
  source: /note="Description of Artificial Sequence: Synthetic oligonucleotide"
  source: /note="Description of Combined DNA/RNA Molecule: Synthetic oligonucleotide"
ucuucugggaacaagaugatt

SEQ ID NO: 2570 - DNA, 21 bp, Artificial Sequence
  source: /note="Description of Artificial Sequence: Synthetic oligonucleotide"
  source: /note="Description of Combined DNA/RNA Molecule: Synthetic oligonucleotide"
ugcaacuguuuucuucuggtt

SEQ ID NO: 2571 - DNA, 21 bp, Artificial Sequence
  source: /note="Description of Artificial Sequence: Synthetic oligonucleotide"
  source: /note="Description of Combined DNA/RNA Molecule: Synthetic oligonucleotide"
guagggcaaacugcaacugtt

SEQ ID NO: 2572 - DNA, 21 bp, Artificial Sequence
  source: /note="Description of Artificial Sequence: Synthetic oligonucleotide"
  source: /note="Description of Combined DNA/RNA Molecule: Synthetic oligonucleotide"
aaucagguagggcaaacugtt

SEQ ID NO: 2573 - DNA, 21 bp, Artificial Sequence
  source: /note="Description of Artificial Sequence: Synthetic oligonucleotide"
  source: /note="Description of Combined DNA/RNA Molecule: Synthetic oligonucleotide"
aggugguuagagaaucaggtt

SEQ ID NO: 2574 - DNA, 21 bp, Artificial Sequence
  source: /note="Description of Artificial Sequence: Synthetic oligonucleotide"
  source: /note="Description of Combined DNA/RNA Molecule: Synthetic oligonucleotide"
cuugaauuucccagguggutt

SEQ ID NO: 2575 - DNA, 21 bp, Artificial Sequence
  source: /note="Description of Artificial Sequence: Synthetic oligonucleotide"
  source: /note="Description of Combined DNA/RNA Molecule: Synthetic oligonucleotide"
ugccaacgccuugaauuuctt

SEQ ID NO: 2576 - DNA, 21 bp, Artificial Sequence
  source: /note="Description of Artificial Sequence: Synthetic oligonucleotide"
  source: /note="Description of Combined DNA/RNA Molecule: Synthetic oligonucleotide"
aguguuugaaaugccaacgtt

SEQ ID NO: 2577 - DNA, 21 bp, Artificial Sequence
  source: /note="Description of Artificial Sequence: Synthetic oligonucleotide"
  source: /note="Description of Combined DNA/RNA Molecule: Synthetic oligonucleotide"
uauaccaguguuugaaaugtt

SEQ ID NO: 2578 - DNA, 21 bp, Artificial Sequence
  source: /note="Description of Artificial Sequence: Synthetic oligonucleotide"
  source: /note="Description of Combined DNA/RNA Molecule: Synthetic oligonucleotide"
guaucagcaacacauauactt

SEQ ID NO: 2579 - DNA, 21 bp, Artificial Sequence
  source: /note="Description of Artificial Sequence: Synthetic oligonucleotide"
  source: /note="Description of Combined DNA/RNA Molecule: Synthetic oligonucleotide"
ugccuugacaguaucagcatt

SEQ ID NO: 2580 - DNA, 21 bp, Artificial Sequence
  source: /note="Description of Artificial Sequence: Synthetic oligonucleotide"
  source: /note="Description of Combined DNA/RNA Molecule: Synthetic oligonucleotide"
aacaccuuugccuugacagtt

SEQ ID NO: 2581 - DNA, 21 bp, Artificial Sequence
  source: /note="Description of Artificial Sequence: Synthetic oligonucleotide"
  source: /note="Description of Combined DNA/RNA Molecule: Synthetic oligonucleotide"
aagacaucuuugaacaccutt

SEQ ID NO: 2582 - DNA, 21 bp, Artificial Sequence
  source: /note="Description of Artificial Sequence: Synthetic oligonucleotide"
  source: /note="Description of Combined DNA/RNA Molecule: Synthetic oligonucleotide"
uuccaggaagacaucuuugtt

SEQ ID NO: 2583 - DNA, 21 bp, Artificial Sequence
  source: /note="Description of Artificial Sequence: Synthetic oligonucleotide"
  source: /note="Description of Combined DNA/RNA Molecule: Synthetic oligonucleotide"
uauauucauuuccaggaagtt

SEQ ID NO: 2584 - DNA, 21 bp, Artificial Sequence
  source: /note="Description of Artificial Sequence: Synthetic oligonucleotide"
  source: /note="Description of Combined DNA/RNA Molecule: Synthetic oligonucleotide"
aacagaauaugguauauuctt

SEQ ID NO: 2585 - DNA, 21 bp, Artificial Sequence
  source: /note="Description of Artificial Sequence: Synthetic oligonucleotide"
  source: /note="Description of Combined DNA/RNA Molecule: Synthetic oligonucleotide"
uccucguacaacagaauautt

SEQ ID NO: 2586 - DNA, 21 bp, Artificial Sequence
  source: /note="Description of Artificial Sequence: Synthetic oligonucleotide"
  source: /note="Description of Combined DNA/RNA Molecule: Synthetic oligonucleotide"
auuggaucuguucuccucgtt

SEQ ID NO: 2587 - DNA, 21 bp, Artificial Sequence
  source: /note="Description of Artificial Sequence: Synthetic oligonucleotide"
  source: /note="Description of Combined DNA/RNA Molecule: Synthetic oligonucleotide"
cuuucaauuggaucuguuctt

SEQ ID NO: 2588 - DNA, 21 bp, Artificial Sequence
  source: /note="Description of Artificial Sequence: Synthetic oligonucleotide"
  source: /note="Description of Combined DNA/RNA Molecule: Synthetic oligonucleotide"
guuguaaacaguuccuuuctt

SEQ ID NO: 2589 - DNA, 21 bp, Artificial Sequence
  source: /note="Description of Artificial Sequence: Synthetic oligonucleotide"
  source: /note="Description of Combined DNA/RNA Molecule: Synthetic oligonucleotide"
uccuauaguuguaaacagutt

SEQ ID NO: 2590 - DNA, 21 bp, Artificial Sequence
  source: /note="Description of Artificial Sequence: Synthetic oligonucleotide"
  source: /note="Description of Combined DNA/RNA Molecule: Synthetic oligonucleotide"
ucccagaaguccuauaguutt

SEQ ID NO: 2591 - DNA, 21 bp, Artificial Sequence
  source: /note="Description of Artificial Sequence: Synthetic oligonucleotide"
  source: /note="Description of Combined DNA/RNA Molecule: Synthetic oligonucleotide"
aacacagaacugcaucccatt

SEQ ID NO: 2592 - DNA, 21 bp, Artificial Sequence
  source: /note="Description of Artificial Sequence: Synthetic oligonucleotide"
  source: /note="Description of Combined DNA/RNA Molecule: Synthetic oligonucleotide"
agacauuuuaacacagaactt

SEQ ID NO: 2593 - DNA, 21 bp, Artificial Sequence
  source: /note="Description of Artificial Sequence: Synthetic oligonucleotide"
  source: /note="Description of Combined DNA/RNA Molecule: Synthetic oligonucleotide"
uccacagcagacauuuuaatt

SEQ ID NO: 2594 - DNA, 21 bp, Artificial Sequence
  source: /note="Description of Artificial Sequence: Synthetic oligonucleotide"
  source: /note="Description of Combined DNA/RNA Molecule: Synthetic oligonucleotide"
gugcagauucccuccacagtt

SEQ ID NO: 2595 - DNA, 21 bp, Artificial Sequence
  source: /note="Description of Artificial Sequence: Synthetic oligonucleotide"
  source: /note="Description of Combined DNA/RNA Molecule: Synthetic oligonucleotide"
uuuccgaagugcagauucctt

SEQ ID NO: 2596 - DNA, 21 bp, Artificial Sequence
  source: /note="Description of Artificial Sequence: Synthetic oligonucleotide"
  source: /note="Description of Combined DNA/RNA Molecule: Synthetic oligonucleotide"
ucaaugacugggcuuuccgtt

SEQ ID NO: 2597 - DNA, 21 bp, Artificial Sequence
  source: /note="Description of Artificial Sequence: Synthetic oligonucleotide"
  source: /note="Description of Combined DNA/RNA Molecule: Synthetic oligonucleotide"
ccugaugaucaaugacuggtt

SEQ ID NO: 2598 - DNA, 21 bp, Artificial Sequence
  source: /note="Description of Artificial Sequence: Synthetic oligonucleotide"
  source: /note="Description of Combined DNA/RNA Molecule: Synthetic oligonucleotide"
aggacuuugugcccugaugtt

SEQ ID NO: 2599 - DNA, 21 bp, Artificial Sequence
  source: /note="Description of Artificial Sequence: Synthetic oligonucleotide"
  source: /note="Description of Combined DNA/RNA Molecule: Synthetic oligonucleotide"
auuuggaggacuuugugcctt

SEQ ID NO: 2600 - DNA, 21 bp, Artificial Sequence
  source: /note="Description of Artificial Sequence: Synthetic oligonucleotide"
  source: /note="Description of Combined DNA/RNA Molecule: Synthetic oligonucleotide"
uuucuggcgcacacauuugtt

SEQ ID NO: 2601 - DNA, 21 bp, Artificial Sequence
  source: /note="Description of Artificial Sequence: Synthetic oligonucleotide"
  source: /note="Description of Combined DNA/RNA Molecule: Synthetic oligonucleotide"
gcccucuacuuucuggcgctt

SEQ ID NO: 2602 - DNA, 21 bp, Artificial Sequence
  source: /note="Description of Artificial Sequence: Synthetic oligonucleotide"
  source: /note="Description of Combined DNA/RNA Molecule: Synthetic oligonucleotide"
acuggaggagcccucuacutt

SEQ ID NO: 2603 - DNA, 21 bp, Artificial Sequence
  source: /note="Description of Artificial Sequence: Synthetic oligonucleotide"
  source: /note="Description of Combined DNA/RNA Molecule: Synthetic oligonucleotide"
gucaccaagugacuggaggtt

SEQ ID NO: 2604 - DNA, 21 bp, Artificial Sequence
  source: /note="Description of Artificial Sequence: Synthetic oligonucleotide"
  source: /note="Description of Combined DNA/RNA Molecule: Synthetic oligonucleotide"
agugaaugucaccaagugatt

SEQ ID NO: 2605 - DNA, 21 bp, Artificial Sequence
  source: /note="Description of Artificial Sequence: Synthetic oligonucleotide"
  source: /note="Description of Combined DNA/RNA Molecule: Synthetic oligonucleotide"
agaggaagcacagugaaugtt

SEQ ID NO: 2606 - DNA, 21 bp, Artificial Sequence
  source: /note="Description of Artificial Sequence: Synthetic oligonucleotide"
  source: /note="Description of Combined DNA/RNA Molecule: Synthetic oligonucleotide"
guugugaaggccaauuucctt

SEQ ID NO: 2607 - DNA, 21 bp, Artificial Sequence
  source: /note="Description of Artificial Sequence: Synthetic oligonucleotide"
  source: /note="Description of Combined DNA/RNA Molecule: Synthetic oligonucleotide"
aaaaauugauguugugaagtt

SEQ ID NO: 2608 - DNA, 21 bp, Artificial Sequence
  source: /note="Description of Artificial Sequence: Synthetic oligonucleotide"
  source: /note="Description of Combined DNA/RNA Molecule: Synthetic oligonucleotide"
aagucuccagugaaaaauutt

SEQ ID NO: 2609 - DNA, 21 bp, Artificial Sequence
  source: /note="Description of Artificial Sequence: Synthetic oligonucleotide"
  source: /note="Description of Combined DNA/RNA Molecule: Synthetic oligonucleotide"
uuccaaaccaagucuccagtt

SEQ ID NO: 2610 - DNA, 21 bp, Artificial Sequence
  source: /note="Description of Artificial Sequence: Synthetic oligonucleotide"
  source: /note="Description of Combined DNA/RNA Molecule: Synthetic oligonucleotide"
aagauuucuuuuccaaacctt

SEQ ID NO: 2611 - DNA, 21 bp, Artificial Sequence
  source: /note="Description of Artificial Sequence: Synthetic oligonucleotide"
  source: /note="Description of Combined DNA/RNA Molecule: Synthetic oligonucleotide"
uaauguuuuuacuaagauutt

SEQ ID NO: 2612 - DNA, 21 bp, Artificial Sequence
  source: /note="Description of Artificial Sequence: Synthetic oligonucleotide"
  source: /note="Description of Combined DNA/RNA Molecule: Synthetic oligonucleotide"
caccacucguaauguuuuutt

SEQ ID NO: 2613 - DNA, 21 bp, Artificial Sequence
  source: /note="Description of Artificial Sequence: Synthetic oligonucleotide"
  source: /note="Description of Combined DNA/RNA Molecule: Synthetic oligonucleotide"
acaccuucuggcaccacuctt

SEQ ID NO: 2614 - DNA, 21 bp, Artificial Sequence
  source: /note="Description of Artificial Sequence: Synthetic oligonucleotide"
  source: /note="Description of Combined DNA/RNA Molecule: Synthetic oligonucleotide"
uucccuuuugacaccuucutt

SEQ ID NO: 2615 - DNA, 21 bp, Artificial Sequence
  source: /note="Description of Artificial Sequence: Synthetic oligonucleotide"
  source: /note="Description of Combined DNA/RNA Molecule: Synthetic oligonucleotide"
auagcuuucccuuuugacatt

SEQ ID NO: 2616 - DNA, 21 bp, Artificial Sequence
  source: /note="Description of Artificial Sequence: Synthetic oligonucleotide"
  source: /note="Description of Combined DNA/RNA Molecule: Synthetic oligonucleotide"
aaaguaacaccagaauagctt

SEQ ID NO: 2617 - DNA, 21 bp, Artificial Sequence
  source: /note="Description of Artificial Sequence: Synthetic oligonucleotide"
  source: /note="Description of Combined DNA/RNA Molecule: Synthetic oligonucleotide"
cuaggauccaaaguaacactt

SEQ ID NO: 2618 - DNA, 21 bp, Artificial Sequence
  source: /note="Description of Artificial Sequence: Synthetic oligonucleotide"
  source: /note="Description of Combined DNA/RNA Molecule: Synthetic oligonucleotide"
auaaauaccccuaggaucctt

SEQ ID NO: 2619 - DNA, 21 bp, Artificial Sequence
  source: /note="Description of Artificial Sequence: Synthetic oligonucleotide"
  source: /note="Description of Combined DNA/RNA Molecule: Synthetic oligonucleotide"
uaaugguaccauaaauacctt

SEQ ID NO: 2620 - DNA, 21 bp, Artificial Sequence
  source: /note="Description of Artificial Sequence: Synthetic oligonucleotide"
  source: /note="Description of Combined DNA/RNA Molecule: Synthetic oligonucleotide"
uuucgucugcuaaugguactt

SEQ ID NO: 2621 - DNA, 21 bp, Artificial Sequence
  source: /note="Description of Artificial Sequence: Synthetic oligonucleotide"
  source: /note="Description of Combined DNA/RNA Molecule: Synthetic oligonucleotide"
ugggaacuccuuucgucugtt

SEQ ID NO: 2622 - DNA, 21 bp, Artificial Sequence
  source: /note="Description of Artificial Sequence: Synthetic oligonucleotide"
  source: /note="Description of Combined DNA/RNA Molecule: Synthetic oligonucleotide"
auccuguaugggaacuccutt

SEQ ID NO: 2623 - DNA, 21 bp, Artificial Sequence
  source: /note="Description of Artificial Sequence: Synthetic oligonucleotide"
  source: /note="Description of Combined DNA/RNA Molecule: Synthetic oligonucleotide"
ucuaaggguauccuguaugtt

SEQ ID NO: 2624 - DNA, 21 bp, Artificial Sequence
  source: /note="Description of Artificial Sequence: Synthetic oligonucleotide"
  source: /note="Description of Combined DNA/RNA Molecule: Synthetic oligonucleotide"
uuuggggaccaaaucuaagtt

SEQ ID NO: 2625 - DNA, 21 bp, Artificial Sequence
  source: /note="Description of Artificial Sequence: Synthetic oligonucleotide"
  source: /note="Description of Combined DNA/RNA Molecule: Synthetic oligonucleotide"
uugauuucuguuuuggggatt

SEQ ID NO: 2626 - DNA, 21 bp, Artificial Sequence
  source: /note="Description of Artificial Sequence: Synthetic oligonucleotide"
  source: /note="Description of Combined DNA/RNA Molecule: Synthetic oligonucleotide"
aaauccuuuugauuucugutt

SEQ ID NO: 2627 - DNA, 21 bp, Artificial Sequence
  source: /note="Description of Artificial Sequence: Synthetic oligonucleotide"
  source: /note="Description of Combined DNA/RNA Molecule: Synthetic oligonucleotide"
uuuacacucaaaauccuuutt

SEQ ID NO: 2628 - DNA, 21 bp, Artificial Sequence
  source: /note="Description of Artificial Sequence: Synthetic oligonucleotide"
  source: /note="Description of Combined DNA/RNA Molecule: Synthetic oligonucleotide"
caagcaguccuuuuacacutt

SEQ ID NO: 2629 - DNA, 21 bp, Artificial Sequence
  source: /note="Description of Artificial Sequence: Synthetic oligonucleotide"
  source: /note="Description of Combined DNA/RNA Molecule: Synthetic oligonucleotide"
ucaccuacaagcaguccuutt

SEQ ID NO: 2630 - DNA, 21 bp, Artificial Sequence
  source: /note="Description of Artificial Sequence: Synthetic oligonucleotide"
  source: /note="Description of Combined DNA/RNA Molecule: Synthetic oligonucleotide"
cagacaagaucucaccuactt

SEQ ID NO: 2631 - DNA, 21 bp, Artificial Sequence
  source: /note="Description of Artificial Sequence: Synthetic oligonucleotide"
  source: /note="Description of Combined DNA/RNA Molecule: Synthetic oligonucleotide"
uuagaacugcagacaagautt

SEQ ID NO: 2632 - DNA, 21 bp, Artificial Sequence
  source: /note="Description of Artificial Sequence: Synthetic oligonucleotide"
  source: /note="Description of Combined DNA/RNA Molecule: Synthetic oligonucleotide"
ugccuuccugacuuagaactt

SEQ ID NO: 2633 - DNA, 21 bp, Artificial Sequence
  source: /note="Description of Artificial Sequence: Synthetic oligonucleotide"
  source: /note="Description of Combined DNA/RNA Molecule: Synthetic oligonucleotide"
uuaggauauugaugccuuctt

SEQ ID NO: 2634 - DNA, 21 bp, Artificial Sequence
  source: /note="Description of Artificial Sequence: Synthetic oligonucleotide"
  source: /note="Description of Combined DNA/RNA Molecule: Synthetic oligonucleotide"
agguggguuaggauauugatt

SEQ ID NO: 2635 - DNA, 21 bp, Artificial Sequence
  source: /note="Description of Artificial Sequence: Synthetic oligonucleotide"
  source: /note="Description of Combined DNA/RNA Molecule: Synthetic oligonucleotide"
acucccuuuggggagguggtt

SEQ ID NO: 2636 - DNA, 21 bp, Artificial Sequence
  source: /note="Description of Artificial Sequence: Synthetic oligonucleotide"
  source: /note="Description of Combined DNA/RNA Molecule: Synthetic oligonucleotide"
cucugcacucccuuuggggtt

SEQ ID NO: 2637 - DNA, 21 bp, Artificial Sequence
  source: /note="Description of Artificial Sequence: Synthetic oligonucleotide"
  source: /note="Description of Combined DNA/RNA Molecule: Synthetic oligonucleotide"
aucagcuccgccucugcactt

SEQ ID NO: 2638 - DNA, 21 bp, Artificial Sequence
  source: /note="Description of Artificial Sequence: Synthetic oligonucleotide"
  source: /note="Description of Combined DNA/RNA Molecule: Synthetic oligonucleotide"
gacaacgcucaucagcucctt

SEQ ID NO: 2639 - DNA, 21 bp, Artificial Sequence
  source: /note="Description of Artificial Sequence: Synthetic oligonucleotide"
  source: /note="Description of Combined DNA/RNA Molecule: Synthetic oligonucleotide"
auagaauacugggacaacgtt

SEQ ID NO: 2640 - DNA, 21 bp, Artificial Sequence
  source: /note="Description of Artificial Sequence: Synthetic oligonucleotide"
  source: /note="Description of Combined DNA/RNA Molecule: Synthetic oligonucleotide"
gaaaaacauagaauacuggtt

SEQ ID NO: 2641 - DNA, 21 bp, Artificial Sequence
  source: /note="Description of Artificial Sequence: Synthetic oligonucleotide"
  source: /note="Description of Combined DNA/RNA Molecule: Synthetic oligonucleotide"
uuuccagguagugaaaaactt

SEQ ID NO: 2642 - DNA, 21 bp, Artificial Sequence
  source: /note="Description of Artificial Sequence: Synthetic oligonucleotide"
  source: /note="Description of Combined DNA/RNA Molecule: Synthetic oligonucleotide"
augauuuccuguuuccaggtt

SEQ ID NO: 2643 - DNA, 21 bp, Artificial Sequence
  source: /note="Description of Artificial Sequence: Synthetic oligonucleotide"
  source: /note="Description of Combined DNA/RNA Molecule: Synthetic oligonucleotide"
ucagaaugaaaaauguucctt

SEQ ID NO: 2644 - DNA, 21 bp, Artificial Sequence
  source: /note="Description of Artificial Sequence: Synthetic oligonucleotide"
  source: /note="Description of Combined DNA/RNA Molecule: Synthetic oligonucleotide"
caauuaaugggucagaaugtt

SEQ ID NO: 2645 - DNA, 21 bp, Artificial Sequence
  source: /note="Description of Artificial Sequence: Synthetic oligonucleotide"
  source: /note="Description of Combined DNA/RNA Molecule: Synthetic oligonucleotide"
ucugcuuuucaauuaauggtt

SEQ ID NO: 2646 - DNA, 21 bp, Artificial Sequence
  source: /note="Description of Artificial Sequence: Synthetic oligonucleotide"
  source: /note="Description of Combined DNA/RNA Molecule: Synthetic oligonucleotide"
uuucuucaguuucugcuuutt

SEQ ID NO: 2647 - DNA, 21 bp, Artificial Sequence
  source: /note="Description of Artificial Sequence: Synthetic oligonucleotide"
  source: /note="Description of Combined DNA/RNA Molecule: Synthetic oligonucleotide"
uuuaauuuuuucuucaguutt

SEQ ID NO: 2648 - DNA, 21 bp, Artificial Sequence
  source: /note="Description of Artificial Sequence: Synthetic oligonucleotide"
  source: /note="Description of Combined DNA/RNA Molecule: Synthetic oligonucleotide"
ucccuucuuuuaauuuuuutt

SEQ ID NO: 2649 - DNA, 21 bp, Artificial Sequence
  source: /note="Description of Artificial Sequence: Synthetic oligonucleotide"
  source: /note="Description of Combined DNA/RNA Molecule: Synthetic oligonucleotide"
cauaaugcucaacaucccutt

SEQ ID NO: 2650 - DNA, 21 bp, Artificial Sequence
  source: /note="Description of Artificial Sequence: Synthetic oligonucleotide"
  source: /note="Description of Combined DNA/RNA Molecule: Synthetic oligonucleotide"
ucuguaggacauaaugcuctt

SEQ ID NO: 2651 - DNA, 21 bp, Artificial Sequence
  source: /note="Description of Artificial Sequence: Synthetic oligonucleotide"
  source: /note="Description of Combined DNA/RNA Molecule: Synthetic oligonucleotide"
ucagcauuucuguaggacatt

SEQ ID NO: 2652 - DNA, 21 bp, Artificial Sequence
  source: /note="Description of Artificial Sequence: Synthetic oligonucleotide"
  source: /note="Description of Combined DNA/RNA Molecule: Synthetic oligonucleotide"
uguaagaguagucagcauutt

SEQ ID NO: 2653 - DNA, 21 bp, Artificial Sequence
  source: /note="Description of Artificial Sequence: Synthetic oligonucleotide"
  source: /note="Description of Combined DNA/RNA Molecule: Synthetic oligonucleotide"
uccacacacuguaagaguatt

SEQ ID NO: 2654 - DNA, 21 bp, Artificial Sequence
  source: /note="Description of Artificial Sequence: Synthetic oligonucleotide"
  source: /note="Description of Combined DNA/RNA Molecule: Synthetic oligonucleotide"
uuccacccuuccacacacutt

SEQ ID NO: 2655 - DNA, 21 bp, Artificial Sequence
  source: /note="Description of Artificial Sequence: Synthetic oligonucleotide"
  source: /note="Description of Combined DNA/RNA Molecule: Synthetic oligonucleotide"
agugcuagcacuuccaccctt

SEQ ID NO: 2656 - DNA, 21 bp, Artificial Sequence
  source: /note="Description of Artificial Sequence: Synthetic oligonucleotide"
  source: /note="Description of Combined DNA/RNA Molecule: Synthetic oligonucleotide"
cuguuaaccaagugcuagctt

SEQ ID NO: 2657 - DNA, 21 bp, Artificial Sequence
  source: /note="Description of Artificial Sequence: Synthetic oligonucleotide"
  source: /note="Description of Combined DNA/RNA Molecule: Synthetic oligonucleotide"
aaagcaaaagcuguuaacctt

SEQ ID NO: 2658 - DNA, 21 bp, Artificial Sequence
  source: /note="Description of Artificial Sequence: Synthetic oligonucleotide"
  source: /note="Description of Combined DNA/RNA Molecule: Synthetic oligonucleotide"
uccaaguacucuuaaagcatt

SEQ ID NO: 2659 - DNA, 21 bp, Artificial Sequence
  source: /note="Description of Artificial Sequence: Synthetic oligonucleotide"
  source: /note="Description of Combined DNA/RNA Molecule: Synthetic oligonucleotide"
uauuuacuuguccaaguactt

SEQ ID NO: 2660 - DNA, 21 bp, Artificial Sequence
  source: /note="Description of Artificial Sequence: Synthetic oligonucleotide"
  source: /note="Description of Combined DNA/RNA Molecule: Synthetic oligonucleotide"
cuacguauuuauuuacuugtt

SEQ ID NO: 2661 - DNA, 21 bp, Artificial Sequence
  source: /note="Description of Artificial Sequence: Synthetic oligonucleotide"
  source: /note="Description of Combined DNA/RNA Molecule: Synthetic oligonucleotide"
uucugcucuacguauuuautt

SEQ ID NO: 2662 - DNA, 21 bp, Artificial Sequence
  source: /note="Description of Artificial Sequence: Synthetic oligonucleotide"
  source: /note="Description of Combined DNA/RNA Molecule: Synthetic oligonucleotide"
uugaauuuugguucugcuctt

SEQ ID NO: 2663 - DNA, 21 bp, Artificial Sequence
  source: /note="Description of Artificial Sequence: Synthetic oligonucleotide"
  source: /note="Description of Combined DNA/RNA Molecule: Synthetic oligonucleotide"
aagaauuacaaauugaauutt

SEQ ID NO: 2664 - DNA, 21 bp, Artificial Sequence
  source: /note="Description of Artificial Sequence: Synthetic oligonucleotide"
  source: /note="Description of Combined DNA/RNA Molecule: Synthetic oligonucleotide"
agccacaauaaagaauuactt

SEQ ID NO: 2665 - DNA, 21 bp, Artificial Sequence
  source: /note="Description of Artificial Sequence: Synthetic oligonucleotide"
  source: /note="Description of Combined DNA/RNA Molecule: Synthetic oligonucleotide"
auucucaacuagccacaautt

SEQ ID NO: 2666 - DNA, 21 bp, Artificial Sequence
  source: /note="Description of Artificial Sequence: Synthetic oligonucleotide"
  source: /note="Description of Combined DNA/RNA Molecule: Synthetic oligonucleotide"
auugauaauucucaacuagtt

SEQ ID NO: 2667 - DNA, 21 bp, Artificial Sequence
  source: /note="Description of Artificial Sequence: Synthetic oligonucleotide"
  source: /note="Description of Combined DNA/RNA Molecule: Synthetic oligonucleotide"
uccauuaucuaauugauaatt

SEQ ID NO: 2668 - DNA, 21 bp, Artificial Sequence
  source: /note="Description of Artificial Sequence: Synthetic oligonucleotide"
  source: /note="Description of Combined DNA/RNA Molecule: Synthetic oligonucleotide"
uuuccuugaaagauccauutt

SEQ ID NO: 2669 - DNA, 21 bp, Artificial Sequence
  source: /note="Description of Artificial Sequence: Synthetic oligonucleotide"
  source: /note="Description of Combined DNA/RNA Molecule: Synthetic oligonucleotide"
ugugaauuuuccuugaaagtt

SEQ ID NO: 2670 - DNA, 21 bp, Artificial Sequence
  source: /note="Description of Artificial Sequence: Synthetic oligonucleotide"
  source: /note="Description of Combined DNA/RNA Molecule: Synthetic oligonucleotide"
uugguugauacugugaauutt

SEQ ID NO: 2671 - DNA, 21 bp, Artificial Sequence
  source: /note="Description of Artificial Sequence: Synthetic oligonucleotide"
  source: /note="Description of Combined DNA/RNA Molecule: Synthetic oligonucleotide"
uaauuuuauugguugauactt

SEQ ID NO: 2672 - DNA, 21 bp, Artificial Sequence
  source: /note="Description of Artificial Sequence: Synthetic oligonucleotide"
  source: /note="Description of Combined DNA/RNA Molecule: Synthetic oligonucleotide"
caagguacccuguaauuuutt

SEQ ID NO: 2673 - DNA, 21 bp, Artificial Sequence
  source: /note="Description of Artificial Sequence: Synthetic oligonucleotide"
  source: /note="Description of Combined DNA/RNA Molecule: Synthetic oligonucleotide"
ucaacaggcaagguacccutt

SEQ ID NO: 2674 - DNA, 21 bp, Artificial Sequence
  source: /note="Description of Artificial Sequence: Synthetic oligonucleotide"
  source: /note="Description of Combined DNA/RNA Molecule: Synthetic oligonucleotide"
uguucucucgggcuucaactt

SEQ ID NO: 2675 - DNA, 21 bp, Artificial Sequence
  source: /note="Description of Artificial Sequence: Synthetic oligonucleotide"
  source: /note="Description of Combined DNA/RNA Molecule: Synthetic oligonucleotide"
auauaagcuguucucucggtt

SEQ ID NO: 2676 - DNA, 21 bp, Artificial Sequence
  source: /note="Description of Artificial Sequence: Synthetic oligonucleotide"
  source: /note="Description of Combined DNA/RNA Molecule: Synthetic oligonucleotide"
aaggcuguaagauauaagctt

SEQ ID NO: 2677 - DNA, 21 bp, Artificial Sequence
  source: /note="Description of Artificial Sequence: Synthetic oligonucleotide"
  source: /note="Description of Combined DNA/RNA Molecule: Synthetic oligonucleotide"
ucacaguaaaggcuguaagtt

SEQ ID NO: 2678 - DNA, 21 bp, Artificial Sequence
  source: /note="Description of Artificial Sequence: Synthetic oligonucleotide"
  source: /note="Description of Combined DNA/RNA Molecule: Synthetic oligonucleotide"
ucgaaagccuuucuaauuctt

SEQ ID NO: 2679 - DNA, 21 bp, Artificial Sequence
  source: /note="Description of Artificial Sequence: Synthetic oligonucleotide"
  source: /note="Description of Combined DNA/RNA Molecule: Synthetic oligonucleotide"
ggggcauauaucgaaagcctt

SEQ ID NO: 2680 - DNA, 21 bp, Artificial Sequence
  source: /note="Description of Artificial Sequence: Synthetic oligonucleotide"
  source: /note="Description of Combined DNA/RNA Molecule: Synthetic oligonucleotide"
ucaccagggggcauauauctt

SEQ ID NO: 2681 - DNA, 21 bp, Artificial Sequence
  source: /note="Description of Artificial Sequence: Synthetic oligonucleotide"
  source: /note="Description of Combined DNA/RNA Molecule: Synthetic oligonucleotide"
agcugugucgauuuucacctt

SEQ ID NO: 2682 - DNA, 21 bp, Artificial Sequence
  source: /note="Description of Artificial Sequence: Synthetic oligonucleotide"
  source: /note="Description of Combined DNA/RNA Molecule: Synthetic oligonucleotide"
uuuaauuagagcugugucgtt

SEQ ID NO: 2683 - DNA, 21 bp, Artificial Sequence
  source: /note="Description of Artificial Sequence: Synthetic oligonucleotide"
  source: /note="Description of Combined DNA/RNA Molecule: Synthetic oligonucleotide"
ugucagcuuuaauuagagctt

SEQ ID NO: 2684 - DNA, 21 bp, Artificial Sequence
  source: /note="Description of Artificial Sequence: Synthetic oligonucleotide"
  source: /note="Description of Combined DNA/RNA Molecule: Synthetic oligonucleotide"
ucaagcagaaaguugucagtt

SEQ ID NO: 2685 - DNA, 21 bp, Artificial Sequence
  source: /note="Description of Artificial Sequence: Synthetic oligonucleotide"
  source: /note="Description of Combined DNA/RNA Molecule: Synthetic oligonucleotide"
uguauuuucaagcagaaagtt

SEQ ID NO: 2686 - DNA, 21 bp, Artificial Sequence
  source: /note="Description of Artificial Sequence: Synthetic oligonucleotide"
  source: /note="Description of Combined DNA/RNA Molecule: Synthetic oligonucleotide"
ugggcuggcaguguauuuutt

SEQ ID NO: 2687 - DNA, 21 bp, Artificial Sequence
  source: /note="Description of Artificial Sequence: Synthetic oligonucleotide"
  source: /note="Description of Combined DNA/RNA Molecule: Synthetic oligonucleotide"
uguaaaggugcucugggcutt

SEQ ID NO: 2688 - DNA, 21 bp, Artificial Sequence
  source: /note="Description of Artificial Sequence: Synthetic oligonucleotide"
  source: /note="Description of Combined DNA/RNA Molecule: Synthetic oligonucleotide"
auggccaauguaaaggugctt

SEQ ID NO: 2689 - DNA, 21 bp, Artificial Sequence
  source: /note="Description of Artificial Sequence: Synthetic oligonucleotide"
  source: /note="Description of Combined DNA/RNA Molecule: Synthetic oligonucleotide"
acgcagaaauggccaaugutt

SEQ ID NO: 2690 - DNA, 21 bp, Artificial Sequence
  source: /note="Description of Artificial Sequence: Synthetic oligonucleotide"
  source: /note="Description of Combined DNA/RNA Molecule: Synthetic oligonucleotide"
agggaaagagcauacgcagtt

SEQ ID NO: 2691 - DNA, 21 bp, Artificial Sequence
  source: /note="Description of Artificial Sequence: Synthetic oligonucleotide"
  source: /note="Description of Combined DNA/RNA Molecule: Synthetic oligonucleotide"
uuuuaucucccagggaaagtt

SEQ ID NO: 2692 - DNA, 21 bp, Artificial Sequence
  source: /note="Description of Artificial Sequence: Synthetic oligonucleotide"
  source: /note="Description of Combined DNA/RNA Molecule: Synthetic oligonucleotide"
ugugggugaguuuuaucuctt

SEQ ID NO: 2693 - DNA, 21 bp, Artificial Sequence
  source: /note="Description of Artificial Sequence: Synthetic oligonucleotide"
  source: /note="Description of Combined DNA/RNA Molecule: Synthetic oligonucleotide"
aacgaaacugugggugagutt

SEQ ID NO: 2694 - DNA, 21 bp, Artificial Sequence
  source: /note="Description of Artificial Sequence: Synthetic oligonucleotide"
  source: /note="Description of Combined DNA/RNA Molecule: Synthetic oligonucleotide"
aaacaauugaacgaaacugtt

SEQ ID NO: 2695 - DNA, 21 bp, Artificial Sequence
  source: /note="Description of Artificial Sequence: Synthetic oligonucleotide"
  source: /note="Description of Combined DNA/RNA Molecule: Synthetic oligonucleotide"
uucaaagcugaaacaauugtt

SEQ ID NO: 2696 - DNA, 21 bp, Artificial Sequence
  source: /note="Description of Artificial Sequence: Synthetic oligonucleotide"
  source: /note="Description of Combined DNA/RNA Molecule: Synthetic oligonucleotide"
aaagcuucucucuucaaagtt

SEQ ID NO: 2697 - DNA, 21 bp, Artificial Sequence
  source: /note="Description of Artificial Sequence: Synthetic oligonucleotide"
  source: /note="Description of Combined DNA/RNA Molecule: Synthetic oligonucleotide"
uuuaaccaaagcuucucuctt

SEQ ID NO: 2698 - DNA, 21 bp, Artificial Sequence
  source: /note="Description of Artificial Sequence: Synthetic oligonucleotide"
  source: /note="Description of Combined DNA/RNA Molecule: Synthetic oligonucleotide"
uggguggauuaccuuuaactt

SEQ ID NO: 2699 - DNA, 21 bp, Artificial Sequence
  source: /note="Description of Artificial Sequence: Synthetic oligonucleotide"
  source: /note="Description of Combined DNA/RNA Molecule: Synthetic oligonucleotide"
aacgauaaauggguggauutt

SEQ ID NO: 2700 - DNA, 21 bp, Artificial Sequence
  source: /note="Description of Artificial Sequence: Synthetic oligonucleotide"
  source: /note="Description of Combined DNA/RNA Molecule: Synthetic oligonucleotide"
uuuccaaaaacgauaaaugtt

SEQ ID NO: 2701 - DNA, 21 bp, Artificial Sequence
  source: /note="Description of Artificial Sequence: Synthetic oligonucleotide"
  source: /note="Description of Combined DNA/RNA Molecule: Synthetic oligonucleotide"
ugaagauugucuuuccaaatt

SEQ ID NO: 2702 - DNA, 21 bp, Artificial Sequence
  source: /note="Description of Artificial Sequence: Synthetic oligonucleotide"
  source: /note="Description of Combined DNA/RNA Molecule: Synthetic oligonucleotide"
ugucuuuaugcugaagauutt

SEQ ID NO: 2703 - DNA, 21 bp, Artificial Sequence
  source: /note="Description of Artificial Sequence: Synthetic oligonucleotide"
  source: /note="Description of Combined DNA/RNA Molecule: Synthetic oligonucleotide"
accaguguuagguacagagtt

SEQ ID NO: 2704 - DNA, 21 bp, Artificial Sequence
  source: /note="Description of Artificial Sequence: Synthetic oligonucleotide"
  source: /note="Description of Combined DNA/RNA Molecule: Synthetic oligonucleotide"
auacgugccguaccagugutt

SEQ ID NO: 2705 - DNA, 21 bp, Artificial Sequence
  source: /note="Description of Artificial Sequence: Synthetic oligonucleotide"
  source: /note="Description of Combined DNA/RNA Molecule: Synthetic oligonucleotide"
uguuucuaccauacgugcctt

SEQ ID NO: 2706 - DNA, 21 bp, Artificial Sequence
  source: /note="Description of Artificial Sequence: Synthetic oligonucleotide"
  source: /note="Description of Combined DNA/RNA Molecule: Synthetic oligonucleotide"
auaggcaguuguuucuacctt

SEQ ID NO: 2707 - DNA, 21 bp, Artificial Sequence
  source: /note="Description of Artificial Sequence: Synthetic oligonucleotide"
  source: /note="Description of Combined DNA/RNA Molecule: Synthetic oligonucleotide"
aguaaagcauaggcaguugtt

SEQ ID NO: 2708 - DNA, 21 bp, Artificial Sequence
  source: /note="Description of Artificial Sequence: Synthetic oligonucleotide"
  source: /note="Description of Combined DNA/RNA Molecule: Synthetic oligonucleotide"
uucagacuggugaguaaagtt

SEQ ID NO: 2709 - DNA, 21 bp, Artificial Sequence
  source: /note="Description of Artificial Sequence: Synthetic oligonucleotide"
  source: /note="Description of Combined DNA/RNA Molecule: Synthetic oligonucleotide"
auaucuuucaaguucagactt

SEQ ID NO: 2710 - DNA, 21 bp, Artificial Sequence
  source: /note="Description of Artificial Sequence: Synthetic oligonucleotide"
  source: /note="Description of Combined DNA/RNA Molecule: Synthetic oligonucleotide"
uaauuuauaucuuucaagutt

SEQ ID NO: 2711 - DNA, 21 bp, Artificial Sequence
  source: /note="Description of Artificial Sequence: Synthetic oligonucleotide"
  source: /note="Description of Combined DNA/RNA Molecule: Synthetic oligonucleotide"
uggguuaacauaauuuauatt

SEQ ID NO: 2712 - DNA, 21 bp, Artificial Sequence
  source: /note="Description of Artificial Sequence: Synthetic oligonucleotide"
  source: /note="Description of Combined DNA/RNA Molecule: Synthetic oligonucleotide"
auuugaugacuggguuaactt

SEQ ID NO: 2713 - DNA, 21 bp, Artificial Sequence
  source: /note="Description of Artificial Sequence: Synthetic oligonucleotide"
  source: /note="Description of Combined DNA/RNA Molecule: Synthetic oligonucleotide"
ucugauagccauuugaugatt

SEQ ID NO: 2714 - DNA, 21 bp, Artificial Sequence
  source: /note="Description of Artificial Sequence: Synthetic oligonucleotide"
  source: /note="Description of Combined DNA/RNA Molecule: Synthetic oligonucleotide"
uaccucugcucuucugauatt

SEQ ID NO: 2715 - DNA, 21 bp, Artificial Sequence
  source: /note="Description of Artificial Sequence: Synthetic oligonucleotide"
  source: /note="Description of Combined DNA/RNA Molecule: Synthetic oligonucleotide"
aagccaccuccauaccucutt

SEQ ID NO: 2716 - DNA, 21 bp, Artificial Sequence
  source: /note="Description of Artificial Sequence: Synthetic oligonucleotide"
  source: /note="Description of Combined DNA/RNA Molecule: Synthetic oligonucleotide"
guugaauaaaagccaccuctt

SEQ ID NO: 2717 - DNA, 21 bp, Artificial Sequence
  source: /note="Description of Artificial Sequence: Synthetic oligonucleotide"
  source: /note="Description of Combined DNA/RNA Molecule: Synthetic oligonucleotide"
uuguguccuggguugaauatt

SEQ ID NO: 2718 - DNA, 21 bp, Artificial Sequence
  source: /note="Description of Artificial Sequence: Synthetic oligonucleotide"
  source: /note="Description of Combined DNA/RNA Molecule: Synthetic oligonucleotide"
auggcauugauuguguccutt

SEQ ID NO: 2719 - DNA, 21 bp, Artificial Sequence
  source: /note="Description of Artificial Sequence: Synthetic oligonucleotide"
  source: /note="Description of Combined DNA/RNA Molecule: Synthetic oligonucleotide"
cccucaauggcauugauugtt

SEQ ID NO: 2720 - DNA, 21 bp, Artificial Sequence
  source: /note="Description of Artificial Sequence: Synthetic oligonucleotide"
  source: /note="Description of Combined DNA/RNA Molecule: Synthetic oligonucleotide"
uuccgucaggcccucaaugtt

SEQ ID NO: 2721 - DNA, 21 bp, Artificial Sequence
  source: /note="Description of Artificial Sequence: Synthetic oligonucleotide"
  source: /note="Description of Combined DNA/RNA Molecule: Synthetic oligonucleotide"
ccaggagugaauauuccgutt

SEQ ID NO: 2722 - DNA, 21 bp, Artificial Sequence
  source: /note="Description of Artificial Sequence: Synthetic oligonucleotide"
  source: /note="Description of Combined DNA/RNA Molecule: Synthetic oligonucleotide"
uuguuuaaccaggagugaatt

SEQ ID NO: 2723 - DNA, 21 bp, Artificial Sequence
  source: /note="Description of Artificial Sequence: Synthetic oligonucleotide"
  source: /note="Description of Combined DNA/RNA Molecule: Synthetic oligonucleotide"
caagcggaguuguuuaacctt

SEQ ID NO: 2724 - DNA, 21 bp, Artificial Sequence
  source: /note="Description of Artificial Sequence: Synthetic oligonucleotide"
  source: /note="Description of Combined DNA/RNA Molecule: Synthetic oligonucleotide"
gauguccauacucaagcggtt

SEQ ID NO: 2725 - DNA, 21 bp, Artificial Sequence
  source: /note="Description of Artificial Sequence: Synthetic oligonucleotide"
  source: /note="Description of Combined DNA/RNA Molecule: Synthetic oligonucleotide"
guaagaaacaucgaugucctt

SEQ ID NO: 2726 - DNA, 21 bp, Artificial Sequence
  source: /note="Description of Artificial Sequence: Synthetic oligonucleotide"
  source: /note="Description of Combined DNA/RNA Molecule: Synthetic oligonucleotide"
augcuuguaagaaacaucgtt

SEQ ID NO: 2727 - DNA, 21 bp, Artificial Sequence
  source: /note="Description of Artificial Sequence: Synthetic oligonucleotide"
  source: /note="Description of Combined DNA/RNA Molecule: Synthetic oligonucleotide"
uaaggcaccuuuaugcuugtt

SEQ ID NO: 2728 - DNA, 21 bp, Artificial Sequence
  source: /note="Description of Artificial Sequence: Synthetic oligonucleotide"
  source: /note="Description of Combined DNA/RNA Molecule: Synthetic oligonucleotide"
uuauaauuauguaaggcactt

SEQ ID NO: 2729 - DNA, 21 bp, Artificial Sequence
  source: /note="Description of Artificial Sequence: Synthetic oligonucleotide"
  source: /note="Description of Combined DNA/RNA Molecule: Synthetic oligonucleotide"
ugucauuuuauaauuaugutt

SEQ ID NO: 2730 - DNA, 21 bp, Artificial Sequence
  source: /note="Description of Artificial Sequence: Synthetic oligonucleotide"
  source: /note="Description of Combined DNA/RNA Molecule: Synthetic oligonucleotide"
aauucuugucugucauuuutt

SEQ ID NO: 2731 - DNA, 21 bp, Artificial Sequence
  source: /note="Description of Artificial Sequence: Synthetic oligonucleotide"
  source: /note="Description of Combined DNA/RNA Molecule: Synthetic oligonucleotide"
ccucccaaggaaauucuugtt

SEQ ID NO: 2732 - DNA, 21 bp, Artificial Sequence
  source: /note="Description of Artificial Sequence: Synthetic oligonucleotide"
  source: /note="Description of Combined DNA/RNA Molecule: Synthetic oligonucleotide"
cucuacuggccucccaaggtt

SEQ ID NO: 2733 - DNA, 21 bp, Artificial Sequence
  source: /note="Description of Artificial Sequence: Synthetic oligonucleotide"
  source: /note="Description of Combined DNA/RNA Molecule: Synthetic oligonucleotide"
auugagaagcaccucuacutt

SEQ ID NO: 2734 - DNA, 21 bp, Artificial Sequence
  source: /note="Description of Artificial Sequence: Synthetic oligonucleotide"
  source: /note="Description of Combined DNA/RNA Molecule: Synthetic oligonucleotide"
ugaggucaucauugagaagtt

SEQ ID NO: 2735 - DNA, 21 bp, Artificial Sequence
  source: /note="Description of Artificial Sequence: Synthetic oligonucleotide"
  source: /note="Description of Combined DNA/RNA Molecule: Synthetic oligonucleotide"
uguacugacaaugaggucatt

SEQ ID NO: 2736 - DNA, 21 bp, Artificial Sequence
  source: /note="Description of Artificial Sequence: Synthetic oligonucleotide"
  source: /note="Description of Combined DNA/RNA Molecule: Synthetic oligonucleotide"
ugccaaauccuguacugactt

SEQ ID NO: 2737 - DNA, 21 bp, Artificial Sequence
  source: /note="Description of Artificial Sequence: Synthetic oligonucleotide"
  source: /note="Description of Combined DNA/RNA Molecule: Synthetic oligonucleotide"
caagccacugccaaauccutt

SEQ ID NO: 2738 - DNA, 21 bp, Artificial Sequence
  source: /note="Description of Artificial Sequence: Synthetic oligonucleotide"
  source: /note="Description of Combined DNA/RNA Molecule: Synthetic oligonucleotide"
auguacuguagccaagccatt

SEQ ID NO: 2739 - DNA, 21 bp, Artificial Sequence
  source: /note="Description of Artificial Sequence: Synthetic oligonucleotide"
  source: /note="Description of Combined DNA/RNA Molecule: Synthetic oligonucleotide"
uuguuacauguacuguagctt

SEQ ID NO: 2740 - DNA, 21 bp, Artificial Sequence
  source: /note="Description of Artificial Sequence: Synthetic oligonucleotide"
  source: /note="Description of Combined DNA/RNA Molecule: Synthetic oligonucleotide"
uuugugaacuacaguuguutt

SEQ ID NO: 2741 - DNA, 21 bp, Artificial Sequence
  source: /note="Description of Artificial Sequence: Synthetic oligonucleotide"
  source: /note="Description of Combined DNA/RNA Molecule: Synthetic oligonucleotide"
uacugguuuugugaacuactt

SEQ ID NO: 2742 - DNA, 21 bp, Artificial Sequence
  source: /note="Description of Artificial Sequence: Synthetic oligonucleotide"
  source: /note="Description of Combined DNA/RNA Molecule: Synthetic oligonucleotide"
uccucagagguacugguuutt

SEQ ID NO: 2743 - DNA, 21 bp, Artificial Sequence
  source: /note="Description of Artificial Sequence: Synthetic oligonucleotide"
  source: /note="Description of Combined DNA/RNA Molecule: Synthetic oligonucleotide"
aaagcugcaaacuuccucatt

SEQ ID NO: 2744 - DNA, 21 bp, Artificial Sequence
  source: /note="Description of Artificial Sequence: Synthetic oligonucleotide"
  source: /note="Description of Combined DNA/RNA Molecule: Synthetic oligonucleotide"
uuuucaaauaaaagcugcatt

SEQ ID NO: 2745 - DNA, 21 bp, Artificial Sequence
  source: /note="Description of Artificial Sequence: Synthetic oligonucleotide"
  source: /note="Description of Combined DNA/RNA Molecule: Synthetic oligonucleotide"
ugaguaucgauuuucaaautt

SEQ ID NO: 2746 - DNA, 21 bp, Artificial Sequence
  source: /note="Description of Artificial Sequence: Synthetic oligonucleotide"
  source: /note="Description of Combined DNA/RNA Molecule: Synthetic oligonucleotide"
uucaauauccugaguaucgtt

SEQ ID NO: 2747 - DNA, 21 bp, Artificial Sequence
  source: /note="Description of Artificial Sequence: Synthetic oligonucleotide"
  source: /note="Description of Combined DNA/RNA Molecule: Synthetic oligonucleotide"
gugggaugcuucaauaucctt

SEQ ID NO: 2748 - DNA, 21 bp, Artificial Sequence
  source: /note="Description of Artificial Sequence: Synthetic oligonucleotide"
  source: /note="Description of Combined DNA/RNA Molecule: Synthetic oligonucleotide"
cucuguagugggaugcuuctt

SEQ ID NO: 2749 - DNA, 21 bp, Artificial Sequence
  source: /note="Description of Artificial Sequence: Synthetic oligonucleotide"
  source: /note="Description of Combined DNA/RNA Molecule: Synthetic oligonucleotide"
uuuccguagccucuguagutt

SEQ ID NO: 2750 - DNA, 21 bp, Artificial Sequence
  source: /note="Description of Artificial Sequence: Synthetic oligonucleotide"
  source: /note="Description of Combined DNA/RNA Molecule: Synthetic oligonucleotide"
uuuguaaucagaguuuccgtt

SEQ ID NO: 2751 - DNA, 21 bp, Artificial Sequence
  source: /note="Description of Artificial Sequence: Synthetic oligonucleotide"
  source: /note="Description of Combined DNA/RNA Molecule: Synthetic oligonucleotide"
uacuaugcguuuguaaucatt

SEQ ID NO: 2752 - DNA, 21 bp, Artificial Sequence
  source: /note="Description of Artificial Sequence: Synthetic oligonucleotide"
  source: /note="Description of Combined DNA/RNA Molecule: Synthetic oligonucleotide"
cuggcacaugcuacuaugctt

SEQ ID NO: 2753 - DNA, 21 bp, Artificial Sequence
  source: /note="Description of Artificial Sequence: Synthetic oligonucleotide"
  source: /note="Description of Combined DNA/RNA Molecule: Synthetic oligonucleotide"
gcuuguagcuggcacaugctt

SEQ ID NO: 2754 - DNA, 21 bp, Artificial Sequence
  source: /note="Description of Artificial Sequence: Synthetic oligonucleotide"
  source: /note="Description of Combined DNA/RNA Molecule: Synthetic oligonucleotide"
uucccugcugggcuuguagtt

SEQ ID NO: 2755 - DNA, 21 bp, Artificial Sequence
  source: /note="Description of Artificial Sequence: Synthetic oligonucleotide"
  source: /note="Description of Combined DNA/RNA Molecule: Synthetic oligonucleotide"
ugaugauucuucccugcugtt

SEQ ID NO: 2756 - DNA, 21 bp, Artificial Sequence
  source: /note="Description of Artificial Sequence: Synthetic oligonucleotide"
  source: /note="Description of Combined DNA/RNA Molecule: Synthetic oligonucleotide"
aggauccagaugaugauuctt

SEQ ID NO: 2757 - DNA, 21 bp, Artificial Sequence
  source: /note="Description of Artificial Sequence: Synthetic oligonucleotide"
  source: /note="Description of Combined DNA/RNA Molecule: Synthetic oligonucleotide"
aucaccgcaugagaggauctt

SEQ ID NO: 2758 - DNA, 21 bp, Artificial Sequence
  source: /note="Description of Artificial Sequence: Synthetic oligonucleotide"
  source: /note="Description of Combined DNA/RNA Molecule: Synthetic oligonucleotide"
auguccaucaccgcaugagtt

SEQ ID NO: 2759 - DNA, 21 bp, Artificial Sequence
  source: /note="Description of Artificial Sequence: Synthetic oligonucleotide"
  source: /note="Description of Combined DNA/RNA Molecule: Synthetic oligonucleotide"
aggcaaggagauguccauctt

SEQ ID NO: 2760 - DNA, 21 bp, Artificial Sequence
  source: /note="Description of Artificial Sequence: Synthetic oligonucleotide"
  source: /note="Description of Combined DNA/RNA Molecule: Synthetic oligonucleotide"
acugauuccaguaggcaagtt

SEQ ID NO: 2761 - DNA, 21 bp, Artificial Sequence
  source: /note="Description of Artificial Sequence: Synthetic oligonucleotide"
  source: /note="Description of Combined DNA/RNA Molecule: Synthetic oligonucleotide"
ucuucauuugcacugauuctt

SEQ ID NO: 2762 - DNA, 21 bp, Artificial Sequence
  source: /note="Description of Artificial Sequence: Synthetic oligonucleotide"
  source: /note="Description of Combined DNA/RNA Molecule: Synthetic oligonucleotide"
uuuuaagucuucuucauuutt

SEQ ID NO: 2763 - DNA, 21 bp, Artificial Sequence
  source: /note="Description of Artificial Sequence: Synthetic oligonucleotide"
  source: /note="Description of Combined DNA/RNA Molecule: Synthetic oligonucleotide"
caagggcuuuuaagucuuctt

SEQ ID NO: 2764 - DNA, 21 bp, Artificial Sequence
  source: /note="Description of Artificial Sequence: Synthetic oligonucleotide"
  source: /note="Description of Combined DNA/RNA Molecule: Synthetic oligonucleotide"
auccaccccuuccacaaggtt

SEQ ID NO: 2765 - DNA, 21 bp, Artificial Sequence
  source: /note="Description of Artificial Sequence: Synthetic oligonucleotide"
  source: /note="Description of Combined DNA/RNA Molecule: Synthetic oligonucleotide"
auaguugauccaccccuuctt

SEQ ID NO: 2766 - DNA, 21 bp, Artificial Sequence
  source: /note="Description of Artificial Sequence: Synthetic oligonucleotide"
  source: /note="Description of Combined DNA/RNA Molecule: Synthetic oligonucleotide"
uaaucagugaauaguugautt

SEQ ID NO: 2767 - DNA, 21 bp, Artificial Sequence
  source: /note="Description of Artificial Sequence: Synthetic oligonucleotide"
  source: /note="Description of Combined DNA/RNA Molecule: Synthetic oligonucleotide"
uuugauuugguaaucagugtt

SEQ ID NO: 2768 - DNA, 21 bp, Artificial Sequence
  source: /note="Description of Artificial Sequence: Synthetic oligonucleotide"
  source: /note="Description of Combined DNA/RNA Molecule: Synthetic oligonucleotide"
uaacauguccaucuuugautt

SEQ ID NO: 2769 - DNA, 21 bp, Artificial Sequence
  source: /note="Description of Artificial Sequence: Synthetic oligonucleotide"
  source: /note="Description of Combined DNA/RNA Molecule: Synthetic oligonucleotide"
guugcagaauaacaugucctt

SEQ ID NO: 2770 - DNA, 21 bp, Artificial Sequence
  source: /note="Description of Artificial Sequence: Synthetic oligonucleotide"
  source: /note="Description of Combined DNA/RNA Molecule: Synthetic oligonucleotide"
aaucgaauucaguugcagatt

SEQ ID NO: 2771 - DNA, 21 bp, Artificial Sequence
  source: /note="Description of Artificial Sequence: Synthetic oligonucleotide"
  source: /note="Description of Combined DNA/RNA Molecule: Synthetic oligonucleotide"
acuggagggaaucgaauuctt

SEQ ID NO: 2772 - DNA, 21 bp, Artificial Sequence
  source: /note="Description of Artificial Sequence: Synthetic oligonucleotide"
  source: /note="Description of Combined DNA/RNA Molecule: Synthetic oligonucleotide"
aaaggaaaucacuggagggtt

SEQ ID NO: 2773 - DNA, 21 bp, Artificial Sequence
  source: /note="Description of Artificial Sequence: Synthetic oligonucleotide"
  source: /note="Description of Combined DNA/RNA Molecule: Synthetic oligonucleotide"
aucguacacaaaggaaauctt

SEQ ID NO: 2774 - DNA, 21 bp, Artificial Sequence
  source: /note="Description of Artificial Sequence: Synthetic oligonucleotide"
  source: /note="Description of Combined DNA/RNA Molecule: Synthetic oligonucleotide"
caaauauccggaaucguactt

SEQ ID NO: 2775 - DNA, 21 bp, Artificial Sequence
  source: /note="Description of Artificial Sequence: Synthetic oligonucleotide"
  source: /note="Description of Combined DNA/RNA Molecule: Synthetic oligonucleotide"
caaagaguucaaauauccgtt

SEQ ID NO: 2776 - DNA, 21 bp, Artificial Sequence
  source: /note="Description of Artificial Sequence: Synthetic oligonucleotide"
  source: /note="Description of Combined DNA/RNA Molecule: Synthetic oligonucleotide"
aaacccaacuucaaagagutt

SEQ ID NO: 2777 - DNA, 21 bp, Artificial Sequence
  source: /note="Description of Artificial Sequence: Synthetic oligonucleotide"
  source: /note="Description of Combined DNA/RNA Molecule: Synthetic oligonucleotide"
aggacugagaaacccaacutt

SEQ ID NO: 2778 - DNA, 21 bp, Artificial Sequence
  source: /note="Description of Artificial Sequence: Synthetic oligonucleotide"
  source: /note="Description of Combined DNA/RNA Molecule: Synthetic oligonucleotide"
aaaguggcaggacugagaatt

SEQ ID NO: 2779 - DNA, 21 bp, Artificial Sequence
  source: /note="Description of Artificial Sequence: Synthetic oligonucleotide"
  source: /note="Description of Combined DNA/RNA Molecule: Synthetic oligonucleotide"
uucguacacugugaaagugtt

SEQ ID NO: 2780 - DNA, 21 bp, Artificial Sequence
  source: /note="Description of Artificial Sequence: Synthetic oligonucleotide"
  source: /note="Description of Combined DNA/RNA Molecule: Synthetic oligonucleotide"
gugguauucguacacugugtt

SEQ ID NO: 2781 - DNA, 21 bp, Artificial Sequence
  source: /note="Description of Artificial Sequence: Synthetic oligonucleotide"
  source: /note="Description of Combined DNA/RNA Molecule: Synthetic oligonucleotide"
uguuuaucuggucuguggutt

SEQ ID NO: 2782 - DNA, 21 bp, Artificial Sequence
  source: /note="Description of Artificial Sequence: Synthetic oligonucleotide"
  source: /note="Description of Combined DNA/RNA Molecule: Synthetic oligonucleotide"
ugguacacuguuuaucuggtt

SEQ ID NO: 2783 - DNA, 21 bp, Artificial Sequence
  source: /note="Description of Artificial Sequence: Synthetic oligonucleotide"
  source: /note="Description of Combined DNA/RNA Molecule: Synthetic oligonucleotide"
uauaaaacaugguacacugtt

SEQ ID NO: 2784 - DNA, 21 bp, Artificial Sequence
  source: /note="Description of Artificial Sequence: Synthetic oligonucleotide"
  source: /note="Description of Combined DNA/RNA Molecule: Synthetic oligonucleotide"
auuggaagugcuauaaaactt

SEQ ID NO: 2785 - DNA, 21 bp, Artificial Sequence
  source: /note="Description of Artificial Sequence: Synthetic oligonucleotide"
  source: /note="Description of Combined DNA/RNA Molecule: Synthetic oligonucleotide"
ugaauuuugauauuggaagtt

SEQ ID NO: 2786 - DNA, 21 bp, Artificial Sequence
  source: /note="Description of Artificial Sequence: Synthetic oligonucleotide"
  source: /note="Description of Combined DNA/RNA Molecule: Synthetic oligonucleotide"
agacuuucugaauuuugautt

SEQ ID NO: 2787 - DNA, 21 bp, Artificial Sequence
  source: /note="Description of Artificial Sequence: Synthetic oligonucleotide"
  source: /note="Description of Combined DNA/RNA Molecule: Synthetic oligonucleotide"
ggcuccuucacagacuuuctt

SEQ ID NO: 2788 - DNA, 21 bp, Artificial Sequence
  source: /note="Description of Artificial Sequence: Synthetic oligonucleotide"
  source: /note="Description of Combined DNA/RNA Molecule: Synthetic oligonucleotide"
acuugcacgcggcuccuuctt

SEQ ID NO: 2789 - DNA, 21 bp, Artificial Sequence
  source: /note="Description of Artificial Sequence: Synthetic oligonucleotide"
  source: /note="Description of Combined DNA/RNA Molecule: Synthetic oligonucleotide"
gcuucuacacacuugcacgtt

SEQ ID NO: 2790 - DNA, 21 bp, Artificial Sequence
  source: /note="Description of Artificial Sequence: Synthetic oligonucleotide"
  source: /note="Description of Combined DNA/RNA Molecule: Synthetic oligonucleotide"
gcccacaaucagcuucuactt

SEQ ID NO: 2791 - DNA, 21 bp, Artificial Sequence
  source: /note="Description of Artificial Sequence: Synthetic oligonucleotide"
  source: /note="Description of Combined DNA/RNA Molecule: Synthetic oligonucleotide"
ugcauuugcccacaaucagtt

SEQ ID NO: 2792 - DNA, 21 bp, Artificial Sequence
  source: /note="Description of Artificial Sequence: Synthetic oligonucleotide"
  source: /note="Description of Combined DNA/RNA Molecule: Synthetic oligonucleotide"
caauucuuccugcauuugctt

SEQ ID NO: 2793 - DNA, 21 bp, Artificial Sequence
  source: /note="Description of Artificial Sequence: Synthetic oligonucleotide"
  source: /note="Description of Combined DNA/RNA Molecule: Synthetic oligonucleotide"
uugucagauccaauucuuctt

SEQ ID NO: 2794 - DNA, 21 bp, Artificial Sequence
  source: /note="Description of Artificial Sequence: Synthetic oligonucleotide"
  source: /note="Description of Combined DNA/RNA Molecule: Synthetic oligonucleotide"
ucucugcagagauugucagtt

SEQ ID NO: 2795 - DNA, 21 bp, Artificial Sequence
  source: /note="Description of Artificial Sequence: Synthetic oligonucleotide"
  source: /note="Description of Combined DNA/RNA Molecule: Synthetic oligonucleotide"
uuuguuuucuugucucugctt

SEQ ID NO: 2796 - DNA, 21 bp, Artificial Sequence
  source: /note="Description of Artificial Sequence: Synthetic oligonucleotide"
  source: /note="Description of Combined DNA/RNA Molecule: Synthetic oligonucleotide"
caugcuguuuguuuucuugtt

SEQ ID NO: 2797 - DNA, 21 bp, Artificial Sequence
  source: /note="Description of Artificial Sequence: Synthetic oligonucleotide"
  source: /note="Description of Combined DNA/RNA Molecule: Synthetic oligonucleotide"
ucucugguuuacaugcugutt

SEQ ID NO: 2798 - DNA, 21 bp, Artificial Sequence
  source: /note="Description of Artificial Sequence: Synthetic oligonucleotide"
  source: /note="Description of Combined DNA/RNA Molecule: Synthetic oligonucleotide"
aagcauaugcaaucucuggtt

SEQ ID NO: 2799 - DNA, 21 bp, Artificial Sequence
  source: /note="Description of Artificial Sequence: Synthetic oligonucleotide"
  source: /note="Description of Combined DNA/RNA Molecule: Synthetic oligonucleotide"
uaacuuuauaagcauaugctt

SEQ ID NO: 2800 - DNA, 21 bp, Artificial Sequence
  source: /note="Description of Artificial Sequence: Synthetic oligonucleotide"
  source: /note="Description of Combined DNA/RNA Molecule: Synthetic oligonucleotide"
ugugaugcuaacuuuauaatt

SEQ ID NO: 2801 - DNA, 21 bp, Artificial Sequence
  source: /note="Description of Artificial Sequence: Synthetic oligonucleotide"
  source: /note="Description of Combined DNA/RNA Molecule: Synthetic oligonucleotide"
uacagugauggaugugaugtt

SEQ ID NO: 2802 - DNA, 21 bp, Artificial Sequence
  source: /note="Description of Artificial Sequence: Synthetic oligonucleotide"
  source: /note="Description of Combined DNA/RNA Molecule: Synthetic oligonucleotide"
aaaacauuuucuacagugatt

SEQ ID NO: 2803 - DNA, 21 bp, Artificial Sequence
  source: /note="Description of Artificial Sequence: Synthetic oligonucleotide"
  source: /note="Description of Combined DNA/RNA Molecule: Synthetic oligonucleotide"
cuugacaaaaacauuuucutt

SEQ ID NO: 2804 - DNA, 21 bp, Artificial Sequence
  source: /note="Description of Artificial Sequence: Synthetic oligonucleotide"
  source: /note="Description of Combined DNA/RNA Molecule: Synthetic oligonucleotide"
uugccuuguacuugacaaatt

SEQ ID NO: 2805 - DNA, 21 bp, Artificial Sequence
  source: /note="Description of Artificial Sequence: Synthetic oligonucleotide"
  source: /note="Description of Combined DNA/RNA Molecule: Synthetic oligonucleotide"
auauccagaaggguugccutt

SEQ ID NO: 2806 - DNA, 21 bp, Artificial Sequence
  source: /note="Description of Artificial Sequence: Synthetic oligonucleotide"
  source: /note="Description of Combined DNA/RNA Molecule: Synthetic oligonucleotide"
uuuguagauauccagaaggtt

SEQ ID NO: 2807 - DNA, 21 bp, Artificial Sequence
  source: /note="Description of Artificial Sequence: Synthetic oligonucleotide"
  source: /note="Description of Combined DNA/RNA Molecule: Synthetic oligonucleotide"
uuccccaguuuuguagauatt

SEQ ID NO: 2808 - DNA, 21 bp, Artificial Sequence
  source: /note="Description of Artificial Sequence: Synthetic oligonucleotide"
  source: /note="Description of Combined DNA/RNA Molecule: Synthetic oligonucleotide"
ucagcaacagcuuccccagtt

SEQ ID NO: 2809 - DNA, 21 bp, Artificial Sequence
  source: /note="Description of Artificial Sequence: Synthetic oligonucleotide"
  source: /note="Description of Combined DNA/RNA Molecule: Synthetic oligonucleotide"
gagucuuucucagcaacagtt

SEQ ID NO: 2810 - DNA, 21 bp, Artificial Sequence
  source: /note="Description of Artificial Sequence: Synthetic oligonucleotide"
  source: /note="Description of Combined DNA/RNA Molecule: Synthetic oligonucleotide"
ugaagguaaucucagaguctt

SEQ ID NO: 2811 - DNA, 21 bp, Artificial Sequence
  source: /note="Description of Artificial Sequence: Synthetic oligonucleotide"
  source: /note="Description of Combined DNA/RNA Molecule: Synthetic oligonucleotide"
uuuuaaugaagguaaucuctt

SEQ ID NO: 2812 - DNA, 21 bp, Artificial Sequence
  source: /note="Description of Artificial Sequence: Synthetic oligonucleotide"
  source: /note="Description of Combined DNA/RNA Molecule: Synthetic oligonucleotide"
uacagguuaccuuuuuaautt

SEQ ID NO: 2813 - DNA, 21 bp, Artificial Sequence
  source: /note="Description of Artificial Sequence: Synthetic oligonucleotide"
  source: /note="Description of Combined DNA/RNA Molecule: Synthetic oligonucleotide"
ucagcguuaguacagguuatt

SEQ ID NO: 2814 - DNA, 21 bp, Artificial Sequence
  source: /note="Description of Artificial Sequence: Synthetic oligonucleotide"
  source: /note="Description of Combined DNA/RNA Molecule: Synthetic oligonucleotide"
uuuaccagcucagcguuagtt

SEQ ID NO: 2815 - DNA, 21 bp, Artificial Sequence
  source: /note="Description of Artificial Sequence: Synthetic oligonucleotide"
  source: /note="Description of Combined DNA/RNA Molecule: Synthetic oligonucleotide"
guacugucuuccuuuuacctt

SEQ ID NO: 2816 - DNA, 21 bp, Artificial Sequence
  source: /note="Description of Artificial Sequence: Synthetic oligonucleotide"
  source: /note="Description of Combined DNA/RNA Molecule: Synthetic oligonucleotide"
auaauuaaguacugucuuctt

SEQ ID NO: 2817 - DNA, 21 bp, Artificial Sequence
  source: /note="Description of Artificial Sequence: Synthetic oligonucleotide"
  source: /note="Description of Combined DNA/RNA Molecule: Synthetic oligonucleotide"
uucuuuacccauaauuaagtt

SEQ ID NO: 2818 - DNA, 21 bp, Artificial Sequence
  source: /note="Description of Artificial Sequence: Synthetic oligonucleotide"
  source: /note="Description of Combined DNA/RNA Molecule: Synthetic oligonucleotide"
uaucuggagggcuucuuuatt

SEQ ID NO: 2819 - DNA, 21 bp, Artificial Sequence
  source: /note="Description of Artificial Sequence: Synthetic oligonucleotide"
  source: /note="Description of Combined DNA/RNA Molecule: Synthetic oligonucleotide"
auuguauuuuaucuggaggtt

SEQ ID NO: 2820 - DNA, 21 bp, Artificial Sequence
  source: /note="Description of Artificial Sequence: Synthetic oligonucleotide"
  source: /note="Description of Combined DNA/RNA Molecule: Synthetic oligonucleotide"
ugaaacugaaauuguauuutt

SEQ ID NO: 2821 - DNA, 21 bp, Artificial Sequence
  source: /note="Description of Artificial Sequence: Synthetic oligonucleotide"
  source: /note="Description of Combined DNA/RNA Molecule: Synthetic oligonucleotide"
guagauguaccugaaacugtt

SEQ ID NO: 2822 - DNA, 21 bp, Artificial Sequence
  source: /note="Description of Artificial Sequence: Synthetic oligonucleotide"
  source: /note="Description of Combined DNA/RNA Molecule: Synthetic oligonucleotide"
ucuaaaggguagauguacctt

SEQ ID NO: 2823 - DNA, 21 bp, Artificial Sequence
  source: /note="Description of Artificial Sequence: Synthetic oligonucleotide"
  source: /note="Description of Combined DNA/RNA Molecule: Synthetic oligonucleotide"
aggucaaggaaucuaaaggtt

SEQ ID NO: 2824 - DNA, 21 bp, Artificial Sequence
  source: /note="Description of Artificial Sequence: Synthetic oligonucleotide"
  source: /note="Description of Combined DNA/RNA Molecule: Synthetic oligonucleotide"
uauucaauccaggucaaggtt

SEQ ID NO: 2825 - DNA, 21 bp, Artificial Sequence
  source: /note="Description of Artificial Sequence: Synthetic oligonucleotide"
  source: /note="Description of Combined DNA/RNA Molecule: Synthetic oligonucleotide"
cuaggccaguauucaaucctt

SEQ ID NO: 2826 - DNA, 21 bp, Artificial Sequence
  source: /note="Description of Artificial Sequence: Synthetic oligonucleotide"
  source: /note="Description of Combined DNA/RNA Molecule: Synthetic oligonucleotide"
uguugugucucuaggccagtt

SEQ ID NO: 2827 - DNA, 21 bp, Artificial Sequence
  source: /note="Description of Artificial Sequence: Synthetic oligonucleotide"
  source: /note="Description of Combined DNA/RNA Molecule: Synthetic oligonucleotide"
gaugaacauguugugucuctt

SEQ ID NO: 2828 - DNA, 21 bp, Artificial Sequence
  source: /note="Description of Artificial Sequence: Synthetic oligonucleotide"
  source: /note="Description of Combined DNA/RNA Molecule: Synthetic oligonucleotide"
aaugcuugacacgaugaactt

SEQ ID NO: 2829 - DNA, 21 bp, Artificial Sequence
  source: /note="Description of Artificial Sequence: Synthetic oligonucleotide"
  source: /note="Description of Combined DNA/RNA Molecule: Synthetic oligonucleotide"
uuagcuaaaaaugcuugactt

SEQ ID NO: 2830 - DNA, 21 bp, Artificial Sequence
  source: /note="Description of Artificial Sequence: Synthetic oligonucleotide"
  source: /note="Description of Combined DNA/RNA Molecule: Synthetic oligonucleotide"
aaauucaucuaaauuagcutt

SEQ ID NO: 2831 - DNA, 21 bp, Artificial Sequence
  source: /note="Description of Artificial Sequence: Synthetic oligonucleotide"
  source: /note="Description of Combined DNA/RNA Molecule: Synthetic oligonucleotide"
aucuucggcaaauucaucutt

SEQ ID NO: 2832 - DNA, 21 bp, Artificial Sequence
  source: /note="Description of Artificial Sequence: Synthetic oligonucleotide"
  source: /note="Description of Combined DNA/RNA Molecule: Synthetic oligonucleotide"
uuuaaaaagauaucuucggtt

SEQ ID NO: 2833 - DNA, 21 bp, Artificial Sequence
  source: /note="Description of Artificial Sequence: Synthetic oligonucleotide"
  source: /note="Description of Combined DNA/RNA Molecule: Synthetic oligonucleotide"
uuagcauccauuuaaaaagtt

SEQ ID NO: 2834 - DNA, 21 bp, Artificial Sequence
  source: /note="Description of Artificial Sequence: Synthetic oligonucleotide"
  source: /note="Description of Combined DNA/RNA Molecule: Synthetic oligonucleotide"
uucaggaauuuuagcaucctt

SEQ ID NO: 2835 - DNA, 21 bp, Artificial Sequence
  source: /note="Description of Artificial Sequence: Synthetic oligonucleotide"
  source: /note="Description of Combined DNA/RNA Molecule: Synthetic oligonucleotide"
cugaacuucaggaauuuuatt

SEQ ID NO: 2836 - DNA, 21 bp, Artificial Sequence
  source: /note="Description of Artificial Sequence: Synthetic oligonucleotide"
  source: /note="Description of Combined DNA/RNA Molecule: Synthetic oligonucleotide"
aacuguaugcagcugaacutt

SEQ ID NO: 2837 - DNA, 21 bp, Artificial Sequence
  source: /note="Description of Artificial Sequence: Synthetic oligonucleotide"
  source: /note="Description of Combined DNA/RNA Molecule: Synthetic oligonucleotide"
auaagugcaaacuguaugctt

SEQ ID NO: 2838 - DNA, 21 bp, Artificial Sequence
  source: /note="Description of Artificial Sequence: Synthetic oligonucleotide"
  source: /note="Description of Combined DNA/RNA Molecule: Synthetic oligonucleotide"
acaacaggaguccauaagutt

SEQ ID NO: 2839 - DNA, 21 bp, Artificial Sequence
  source: /note="Description of Artificial Sequence: Synthetic oligonucleotide"
  source: /note="Description of Combined DNA/RNA Molecule: Synthetic oligonucleotide"
acuucaacaacaggagucctt

SEQ ID NO: 2840 - DNA, 21 bp, Artificial Sequence
  source: /note="Description of Artificial Sequence: Synthetic oligonucleotide"
  source: /note="Description of Combined DNA/RNA Molecule: Synthetic oligonucleotide"
aaaaaaacgaacuucaacatt

SEQ ID NO: 2841 - DNA, 21 bp, Artificial Sequence
  source: /note="Description of Artificial Sequence: Synthetic oligonucleotide"
  source: /note="Description of Combined DNA/RNA Molecule: Synthetic oligonucleotide"
aaaagaagaaaacaaaaaatt

SEQ ID NO: 2842 - DNA, 21 bp, Artificial Sequence
  source: /note="Description of Artificial Sequence: Synthetic oligonucleotide"
  source: /note="Description of Combined DNA/RNA Molecule: Synthetic oligonucleotide"
aauguuuaaaaaaagaagatt

SEQ ID NO: 2843 - DNA, 21 bp, Artificial Sequence
  source: /note="Description of Artificial Sequence: Synthetic oligonucleotide"
  source: /note="Description of Combined DNA/RNA Molecule: Synthetic oligonucleotide"
agcuaugaauguuuaaaaatt

SEQ ID NO: 2844 - DNA, 21 bp, Artificial Sequence
  source: /note="Description of Artificial Sequence: Synthetic oligonucleotide"
  source: /note="Description of Combined DNA/RNA Molecule: Synthetic oligonucleotide"
uacaaauaagaccagcuautt

SEQ ID NO: 2845 - DNA, 21 bp, Artificial Sequence
  source: /note="Description of Artificial Sequence: Synthetic oligonucleotide"
  source: /note="Description of Combined DNA/RNA Molecule: Synthetic oligonucleotide"
ugagcuuuacaaauaagactt

SEQ ID NO: 2846 - DNA, 21 bp, Artificial Sequence
  source: /note="Description of Artificial Sequence: Synthetic oligonucleotide"
  source: /note="Description of Combined DNA/RNA Molecule: Synthetic oligonucleotide"
ucuaaguaaagugagcuuutt

SEQ ID NO: 2847 - DNA, 21 bp, Artificial Sequence
  source: /note="Description of Artificial Sequence: Synthetic oligonucleotide"
  source: /note="Description of Combined DNA/RNA Molecule: Synthetic oligonucleotide"
agugccacuaauucuaagutt

SEQ ID NO: 2848 - DNA, 21 bp, Artificial Sequence
  source: /note="Description of Artificial Sequence: Synthetic oligonucleotide"
  source: /note="Description of Combined DNA/RNA Molecule: Synthetic oligonucleotide"
aauaaaagcaagugccacutt

SEQ ID NO: 2849 - DNA, 21 bp, Artificial Sequence
  source: /note="Description of Artificial Sequence: Synthetic oligonucleotide"
  source: /note="Description of Combined DNA/RNA Molecule: Synthetic oligonucleotide"
aucauucucuaauaaaagctt

SEQ ID NO: 2850 - DNA, 21 bp, Artificial Sequence
  source: /note="Description of Artificial Sequence: Synthetic oligonucleotide"
  source: /note="Description of Combined DNA/RNA Molecule: Synthetic oligonucleotide"
agcauuugaaaucauucuctt

SEQ ID NO: 2851 - DNA, 21 bp, Artificial Sequence
  source: /note="Description of Artificial Sequence: Synthetic oligonucleotide"
  source: /note="Description of Combined DNA/RNA Molecule: Synthetic oligonucleotide"
aaaguuacagcauuugaaatt

SEQ ID NO: 2852 - DNA, 21 bp, Artificial Sequence
  source: /note="Description of Artificial Sequence: Synthetic oligonucleotide"
  source: /note="Description of Combined DNA/RNA Molecule: Synthetic oligonucleotide"
uguuauuucagaaaguuactt

SEQ ID NO: 2853 - DNA, 21 bp, Artificial Sequence
  source: /note="Description of Artificial Sequence: Synthetic oligonucleotide"
  source: /note="Description of Combined DNA/RNA Molecule: Synthetic oligonucleotide"
uccaaggccauguuauuuctt

SEQ ID NO: 2854 - DNA, 21 bp, Artificial Sequence
  source: /note="Description of Artificial Sequence: Synthetic oligonucleotide"
  source: /note="Description of Combined DNA/RNA Molecule: Synthetic oligonucleotide"
gucuucaugcccuccaaggtt

SEQ ID NO: 2855 - DNA, 21 bp, Artificial Sequence
  source: /note="Description of Artificial Sequence: Synthetic oligonucleotide"
  source: /note="Description of Combined DNA/RNA Molecule: Synthetic oligonucleotide"
guaucugucuucaugcccutt

SEQ ID NO: 2856 - DNA, 21 bp, Artificial Sequence
  source: /note="Description of Artificial Sequence: Synthetic oligonucleotide"
  source: /note="Description of Combined DNA/RNA Molecule: Synthetic oligonucleotide"
auaaccuuggaggaguauctt

SEQ ID NO: 2857 - DNA, 21 bp, Artificial Sequence
  source: /note="Description of Artificial Sequence: Synthetic oligonucleotide"
  source: /note="Description of Combined DNA/RNA Molecule: Synthetic oligonucleotide"
uguccaauaaccuuggaggtt

SEQ ID NO: 2858 - DNA, 21 bp, Artificial Sequence
  source: /note="Description of Artificial Sequence: Synthetic oligonucleotide"
  source: /note="Description of Combined DNA/RNA Molecule: Synthetic oligonucleotide"
uuuauuguuuccggugucctt

SEQ ID NO: 2859 - DNA, 21 bp, Artificial Sequence
  source: /note="Description of Artificial Sequence: Synthetic oligonucleotide"
  source: /note="Description of Combined DNA/RNA Molecule: Synthetic oligonucleotide"
uguuccaauuuauuguuuctt

SEQ ID NO: 2860 - DNA, 21 bp, Artificial Sequence
  source: /note="Description of Artificial Sequence: Synthetic oligonucleotide"
  source: /note="Description of Combined DNA/RNA Molecule: Synthetic oligonucleotide"
uuugaggagguguuccaautt

SEQ ID NO: 2861 - DNA, 21 bp, Artificial Sequence
  source: /note="Description of Artificial Sequence: Synthetic oligonucleotide"
  source: /note="Description of Combined DNA/RNA Molecule: Synthetic oligonucleotide"
ugagugguagguuugaggatt

SEQ ID NO: 2862 - DNA, 21 bp, Artificial Sequence
  source: /note="Description of Artificial Sequence: Synthetic oligonucleotide"
  source: /note="Description of Combined DNA/RNA Molecule: Synthetic oligonucleotide"
aaacauuccugagugguagtt

SEQ ID NO: 2863 - DNA, 21 bp, Artificial Sequence
  source: /note="Description of Artificial Sequence: Synthetic oligonucleotide"
  source: /note="Description of Combined DNA/RNA Molecule: Synthetic oligonucleotide"
uucggccccagcaaacauutt

SEQ ID NO: 2864 - DNA, 21 bp, Artificial Sequence
  source: /note="Description of Artificial Sequence: Synthetic oligonucleotide"
  source: /note="Description of Combined DNA/RNA Molecule: Synthetic oligonucleotide"
uguucuuucggccccagcatt

SEQ ID NO: 2865 - DNA, 21 bp, Artificial Sequence
  source: /note="Description of Artificial Sequence: Synthetic oligonucleotide"
  source: /note="Description of Combined DNA/RNA Molecule: Synthetic oligonucleotide"
uuucaauggacuguucuuutt

SEQ ID NO: 2866 - DNA, 21 bp, Artificial Sequence
  source: /note="Description of Artificial Sequence: Synthetic oligonucleotide"
  source: /note="Description of Combined DNA/RNA Molecule: Synthetic oligonucleotide"
guaauacucccuuucaaugtt

SEQ ID NO: 2867 - DNA, 21 bp, Artificial Sequence
  source: /note="Description of Artificial Sequence: Synthetic oligonucleotide"
  source: /note="Description of Combined DNA/RNA Molecule: Synthetic oligonucleotide"
cauguuuuuguaauacucctt

SEQ ID NO: 2868 - DNA, 21 bp, Artificial Sequence
  source: /note="Description of Artificial Sequence: Synthetic oligonucleotide"
  source: /note="Description of Combined DNA/RNA Molecule: Synthetic oligonucleotide"
caagcaaaggccauguuuutt

SEQ ID NO: 2869 - DNA, 21 bp, Artificial Sequence
  source: /note="Description of Artificial Sequence: Synthetic oligonucleotide"
  source: /note="Description of Combined DNA/RNA Molecule: Synthetic oligonucleotide"
uuuucuuucaagcaaaggctt

SEQ ID NO: 2870 - DNA, 21 bp, Artificial Sequence
  source: /note="Description of Artificial Sequence: Synthetic oligonucleotide"
  source: /note="Description of Combined DNA/RNA Molecule: Synthetic oligonucleotide"
uuccuugguauuuucuuuctt

SEQ ID NO: 2871 - DNA, 21 bp, Artificial Sequence
  source: /note="Description of Artificial Sequence: Synthetic oligonucleotide"
  source: /note="Description of Combined DNA/RNA Molecule: Synthetic oligonucleotide"
ucaguuuccuguuccuuggtt

SEQ ID NO: 2872 - DNA, 21 bp, Artificial Sequence
  source: /note="Description of Artificial Sequence: Synthetic oligonucleotide"
  source: /note="Description of Combined DNA/RNA Molecule: Synthetic oligonucleotide"
caggcuuuaaugaucaguutt

SEQ ID NO: 2873 - RNA, 21 nt, Artificial Sequence
  source: /note="Description of Artificial Sequence: Synthetic oligonucleotide"
aagcaagauauuuuuauaaua

SEQ ID NO: 2874 - RNA, 21 nt, Artificial Sequence
  source: /note="Description of Artificial Sequence: Synthetic oligonucleotide"
aagcaagauauuuuuauaaua

SEQ ID NO: 2875 - RNA, 21 nt, Artificial Sequence
  source: /note="Description of Artificial Sequence: Synthetic oligonucleotide"
aagcaagauauuuuuauaaua

SEQ ID NO: 2876 - RNA, 21 nt, Artificial Sequence
  source: /note="Description of Artificial Sequence: Synthetic oligonucleotide"
aagcaagauauuuuuauaaua

SEQ ID NO: 2877 - RNA, 21 nt, Artificial Sequence
  source: /note="Description of Artificial Sequence: Synthetic oligonucleotide"
aagcaagauauuuuuauaaua

SEQ ID NO: 2878 - RNA, 21 nt, Artificial Sequence
  source: /note="Description of Artificial Sequence: Synthetic oligonucleotide"
aagcaagauauuuuuauaaua

SEQ ID NO: 2879 - RNA, 21 nt, Artificial Sequence
  source: /note="Description of Artificial Sequence: Synthetic oligonucleotide"
aagcaagauauuuuuauaaua

SEQ ID NO: 2880 - DNA, 21 bp, Artificial Sequence
  source: /note="Description of Artificial Sequence: Synthetic oligonucleotide"
  source: /note="Description of Combined DNA/RNA Molecule: Synthetic oligonucleotide"
aagcaagauauuuuuataaua

SEQ ID NO: 2881 - DNA, 21 bp, Artificial Sequence
  source: /note="Description of Artificial Sequence: Synthetic oligonucleotide"
  source: /note="Description of Combined DNA/RNA Molecule: Synthetic oligonucleotide"
aagcaagauauuuuuataaua

SEQ ID NO: 2882 - DNA, 21 bp, Artificial Sequence
  source: /note="Description of Artificial Sequence: Synthetic oligonucleotide"
  source: /note="Description of Combined DNA/RNA Molecule: Synthetic oligonucleotide"
aagcaagauauuuuuataaua

SEQ ID NO: 2883 - RNA, 21 nt, Artificial Sequence
  source: /note="Description of Artificial Sequence: Synthetic oligonucleotide"
aagcaagauauuuuuauaaua

SEQ ID NO: 2884 - RNA, 21 nt, Artificial Sequence
  source: /note="Description of Artificial Sequence: Synthetic oligonucleotide"
aagcaagauauuuuuauaaua

SEQ ID NO: 2885 - RNA, 21 nt, Artificial Sequence
  source: /note="Description of Artificial Sequence: Synthetic oligonucleotide"
aagcaagauauuuuuauaaua

SEQ ID NO: 2886 - RNA, 23 nt, Artificial Sequence
  source: /note="Description of Artificial Sequence: Synthetic oligonucleotide"
uauuauaaaaauaucuugcuuuu

SEQ ID NO: 2887 - DNA, 25 bp, Artificial Sequence
  source: /note="Description of Artificial Sequence: Synthetic oligonucleotide"
  source: /note="Description of Combined DNA/RNA Molecule: Synthetic oligonucleotide"
uauuauaaaaauaucuugcuuuutt

SEQ ID NO: 2888 - DNA, 25 bp, Artificial Sequence
  source: /note="Description of Artificial Sequence: Synthetic oligonucleotide"
  source: /note="Description of Combined DNA/RNA Molecule: Synthetic oligonucleotide"
uauuauaaaaauaucuugcuuuutt

SEQ ID NO: 2889 - DNA, 25 bp, Artificial Sequence
  source: /note="Description of Artificial Sequence: Synthetic oligonucleotide"
  source: /note="Description of Combined DNA/RNA Molecule: Synthetic oligonucleotide"
uauuauaaaaauaucuugcuuuutt

SEQ ID NO: 2890 - DNA, 25 bp, Artificial Sequence
  source: /note="Description of Artificial Sequence: Synthetic oligonucleotide"
  source: /note="Description of Combined DNA/RNA Molecule: Synthetic oligonucleotide"
uauuauaaaaauaucuugcuuuutt

SEQ ID NO: 2891 - DNA, 25 bp, Artificial Sequence
  source: /note="Description of Artificial Sequence: Synthetic oligonucleotide"
  source: /note="Description of Combined DNA/RNA Molecule: Synthetic oligonucleotide"
uauuauaaaaauaucuugcuuuutt

SEQ ID NO: 2892 - DNA, 25 bp, Artificial Sequence
  source: /note="Description of Artificial Sequence: Synthetic oligonucleotide"
  source: /note="Description of Combined DNA/RNA Molecule: Synthetic oligonucleotide"
uauuauaaaaauaucuugcuuuutt

SEQ ID NO: 2893 - DNA, 25 bp, Artificial Sequence
  source: /note="Description of Artificial Sequence: Synthetic oligonucleotide"
  source: /note="Description of Combined DNA/RNA Molecule: Synthetic oligonucleotide"
uauuauaaaaauaucuugcuuuutt

SEQ ID NO: 2894 - DNA, 25 bp, Artificial Sequence
  source: /note="Description of Artificial Sequence: Synthetic oligonucleotide"
  source: /note="Description of Combined DNA/RNA Molecule: Synthetic oligonucleotide"
uauuauaaaaauaucuugcuuuutt

SEQ ID NO: 2895 - DNA, 25 bp, Artificial Sequence
  source: /note="Description of Artificial Sequence: Synthetic oligonucleotide"
  source: /note="Description of Combined DNA/RNA Molecule: Synthetic oligonucleotide"
uauuauaaaaauaucuugcuuuutt

SEQ ID NO: 2896 - DNA, 25 bp, Artificial Sequence
  source: /note="Description of Artificial Sequence: Synthetic oligonucleotide"
  source: /note="Description of Combined DNA/RNA Molecule: Synthetic oligonucleotide"
uauuauaaaaauaucuugcuuuutt

SEQ ID NO: 2897 - DNA, 25 bp, Artificial Sequence
  source: /note="Description of Artificial Sequence: Synthetic oligonucleotide"
  source: /note="Description of Combined DNA/RNA Molecule: Synthetic oligonucleotide"
uauuauaaaaauaucuugcuuuutt

SEQ ID NO: 2898 - DNA, 25 bp, Artificial Sequence
  source: /note="Description of Artificial Sequence: Synthetic oligonucleotide"
  source: /note="Description of Combined DNA/RNA Molecule: Synthetic oligonucleotide"
uauuauaaaaauaucuugcuuuutt

SEQ ID NO: 2899 - DNA, 25 bp, Artificial Sequence
  source: /note="Description of Artificial Sequence: Synthetic oligonucleotide"
  source: /note="Description of Combined DNA/RNA Molecule: Synthetic oligonucleotide"
uauuauaaaaauaucuugcuuuutt

SEQ ID NO: 2900 - RNA, 21 nt, Artificial Sequence
  source: /note="Description of Artificial Sequence: Synthetic oligonucleotide"
aagcaagauauuuuuauaaua
